(19) United States
(12) Patent Application Publication
(10) Pub. No.: US 2011/0076722 A1
(43) Pub. Date: Mar. 31, 2011

(54) STABLE MULTIVALENT ANTIBODY

(75) Inventor: Nobuaki Takahashi, Tokyo (JP)

(73) Assignee: KYOWA HAKKO KIRIN CO., LTD., Tokyo (JP)

(21) Appl. No.: 12/989,600

(22) PCT Filed: Apr. 27, 2009
(86) PCT No.: PCT/JP2009/058249

§ 371 Date: Oct. 25, 2010

(30) Foreign Application Priority Data
Apr. 25, 2008 (JP) 2008-115463

(51) Int. Cl. C12P 21/00; C07K 16/00; C12N 15/13; C12N 15/63; C12N 5/00

(52) U.S. Cl. 435/69.6; 530/387.3; 536/23.53; 435/320.1; 435/325

(57) ABSTRACT

The present invention relates to a multivalent antibody comprising multiple heavy chain variable regions of antibody linked to each other via a linker comprising an amino acid sequence encoding an immunoglobulin domain or a fragment thereof.

### TECHNICAL FIELD

[0001] The present invention relates to a multivalent antibody in which multiple heavy chain variable regions of antibody (hereinafter, simply referred to as VH) are linked to each other via an immunoglobulin domain or a fragment thereof; DNA encoding an amino acid sequence of the multivalent antibody; a vector comprising the DNA; a transformant which expresses the multivalent antibody; and a method for producing the multivalent antibody using the transformant.

### BACKGROUND ART

[0002] Immunoglobulins are glycoproteins which exist in serum, and tissue and body fluid of all mammals and have a function of recognizing foreign antigens (Non-patent Literature 1). The antibody is involved in biological defense through activation of the complement system and activation of their effector functions, such as effects of cell phagocytosis, antibody-dependent cellular cytotoxicity, mediator release, antigen presentation, via receptors (FcR) existing on the cell surface. There are five different classes of human immunoglobulins, namely IgG, IgA, IgM, IgD, and IgE. IgG can be classified into the 4 subclasses of IgG1, IgG2, IgG3, and IgG4. Also, IgA can be classified into 2 subclasses of IgA1 and IgA2. The basic structure of immunoglobulin is composed of two L (light) chains and two H (heavy) chains. Class and subclass of the immunoglobulin are determined by H chains. Different class and subclass of immunoglobulins are known to have different functions. For instance, the level of complement-binding ability decreases in the following order: IgM>IgG3>IgG1>IgG2. Also, the level of affinity to FcγRI (Fc receptor I) decreases in the following order: IgG3>IgG1 >IgG4>IgG2. In addition, IgG1, IgG2, and IgG4 can bind to protein A. Specificity of antibody to an antigen is determined by the combination of heavy chains and light chains. In the case of IgG, one molecule is composed of two pair of a heavy chain and a light chain and has two antibody recognition sites per one antibody molecule.

[0003] In recent years, many clinical trials for monoclonal antibodies have been carried out. In addition, there are many monoclonal antibodies which are commercially available (Non-Patent Literature 2). In 1986, a mouse anti-CD3 antibody, muromonab-CD3, was approved by the FDA. In 1994, a chimeric antibody abciximab in which a mouse constant region of the antibody was substituted with a human constant region in order to reduce the antigenicity was approved. Humanization technologies were developed in order to further reduce the antigenicity. In 1997, an anti-CD20 humanized antibody, daclizumab, in which a variable region was humanized was approved. In 2002, the fully human anti-TNF antibody, adalimumab, was approved.

[0004] For the purpose of modifying the antibody activity, production of mutants of various antibodies has been attempted. For example, a multivalent antibody which recognizes different antigens was produced by a hybrid hybridoma. However, when this method is used, since two different types of heavy chain and light chain are expressed in one cell, approximately ten combinations of the heavy chain and the light chain of an antibody are obtained. Accordingly, as a result, the productivity of a multivalent antibody having desired combination of a heavy chain and a light chain is lowered, and moreover it is difficult to isolate and purify the targeted multivalent antibody (Non-Patent Literature 3).

[0005] In order to overcome this problem, an attempt to produce an antibody having a correct combination of polypeptides by reducing the variations of the combinations of subunits by linking multiple antigen recognition sites in one polypeptide chain has been reported. For example, an antibody comprising scFv in which antigen recognition sites of a heavy chain and a light chain are linked to each other via one polypeptide (Non-Patent Literature 4) is known. Moreover, an antibody in which two antigen recognition sites are linked each other using an CH1 domain of a H chain constant region, a partial fragment of thereof, or L chain constant region of an antibody IgG1, or a flexible linker (Gly-Gly-Gly-Gly-Ser) (Non-Patent Literature 5, Patent Literature 1, Patent Literature 2) or the like has been reported.

[0006] However, such a conventional multivalent antibody has disadvantages in that antibody protein is easily aggregated, and stability and productivity thereof are low.

### CITATION LIST

### Non-patent Literature

[0007] Non-patent Literature 1: Charles A. Janeway et al. Immunobiology, 1997, Current Biology Ltd/Garland Publishing Inc.
[0008] Non-patent Literature 2: Emmanuelle Laffy et al., Human Antibodies 14, 33-55, 2005
[0009] Non-patent Literature 3: Suresh et al., Methods Enzymol. 121, 210-228, 1986
[0010] Non-patent Literature 4: Gruber et al., J. Immunol. 152, 5369, 1994
[0011] Non-patent Literature 5: Wu et al., Nat. Biothech. 25, 1290-1297, 2007
[0012] Non-patent Literature 6: Kabat et al., Sequences of proteins of immunological interest, 1991 Fifth edition
[0013] Non-patent Literature 7: Tomizuka. et al., Proc Natl Acad Sci USA., 2000 Vol 97:722
[0014] Non-patent Literature 8: Yelton, D. E. et al. Current Topics in Microbiology and Immunology, 81, 1-7 (1978)
[0015] Non-patent Literature 9: Kohler, G et al. European J. Immunology, 6, 511-519 (1976)
[0016] Non-patent Literature 10: Shulman, M. et al. Nature, 276, 269-270 (1978)
[0017] Non-patent Literature 11: Kearney, J. F. et al. J. Immunology, 123, 1548-1550 (1979)
[0018] Non-patent Literature 12: Horibata, K. and Harris, A. W. Nature, 256, 495-497 (1975)
[0019] Non-patent Literature 13: P. J. Delves. ANTIBODY PRODUCTION ESSENTIAL TECHNIQUES., 1997 WILEY
[0020] Non-patent Literature 14: P. Shepherd and C. Dean. Monoclonal Antibodies., 2000 OXFORD UNIVERSITY PRESS,
[0021] Non-patent Literature 15: J. W. Goding. Monoclonal Antibodies: principles and practice., 1993, ACADEMIC PRESS

### Patent Literature

[0022] Patent Literature 1: US2007/0071675
[0023] Patent Literature 2: WO2001/77342

### SUMMARY OF INVENTION

### Technical Problem

[0024] A multivalent antibody which has multiple antigen recognition sites and is highly stable and productive has been required for long time.

### Solution to Problem

[0025] As a result of deliberation to solve the above-mentioned problem, the present inventors have found that, among multivalent antibodies comprising multiple antigen recognition sites in one heavy chain polypeptide, a multivalent antibody comprising antigen recognition sites which are not close to each other is highly stable and excellent in productivity.

[0026] The present inventors have found that such a multivalent antibody is highly stable and productive and therefore is useful for various drugs and reagents for studies, and have accomplished the present invention based on this knowledge.

[0027] That is, the present invention is summarized to comprise the following characteristics.

[0028] (1) A multivalent antibody, comprising multiple heavy chain variable regions of antibody (hereinafter, referred to as VH) linked to each other via a linker comprising an amino acid sequence encoding an immunoglobulin domain or a fragment thereof.

[0029] (2) The multivalent antibody described in (1), wherein the immunoglobulin domain is an immunoglobulin domain comprising CH1, hinge, CH2, and/or CH3.

[0030] (3) The multivalent antibody described in (2), wherein the immunoglobulin domain is CH1 or a CH1 fragment.

[0031] (4) The multivalent antibody described in (3), wherein the CH1 fragment is a CH1 fragment comprising 14 amino acids with cysteine (Cys) at position 14.

[0032] (5) The multivalent antibody described in (4), wherein the CH1 fragment is an amino acid sequence positions at 1 to 14 from the N-terminal of an amino acid sequence of CH1 of an antibody subclass selected from IgD, IgM, IgG, IgA, and IgE.

[0033] (6) The multivalent antibody described in (5), wherein the amino acid sequence of the CH1 fragment is the amino acid sequences represented by any one selected from SEQ ID NO:311 and SEQ ID NOs:334 to 361.

[0034] (7) The multivalent antibody described in (3), wherein the amino acid sequence of the CH1 fragment is the amino acid sequences represented by any one selected from SEQ ID NOs:362 to 375.

[0035] (8) The multivalent antibody described in any one of (1) to (7), comprising the same light chains.

[0036] (9) A DNA encoding an amino acid sequence encoding the multivalent antibody described in any one of (1) to (8).

[0037] (10) A recombination vector comprising the DNA described in (9).

[0038] (11) A transformant into which the recombination vector described in (10) is introduced.

[0039] (12) A method for producing the multivalent antibody described in any one of (1) to (8), comprising culturing the transformant described in (11) in medium to produce and accumulate the multivalent antibody described in any one of (1) to (8) in the culture, and recovering the antibody or the fragment of the antibody from the culture.

### ADVANTAGEOUS EFFECTS OF INVENTION

[0040] The multivalent antibody of the present invention is highly stable and excellent in productivity. In addition, the multivalent antibody of the present invention can be used as a therapeutic agent or a diagnostic agent for various types of disease. Moreover, the multivalent antibody of the present invention can be used as a stable reagent for research.

[0041] This description includes part or all of the contents as disclosed in the description of Japanese Patent Application No. 2008-115463, which is a priority document of the present application.

### BRIEF DESCRIPTION OF DRAWINGS

[0042] FIG. 1 is a diagram illustrating a structure of a multivalent antibody of the present invention. The heavy-line frames represent linker structures.

### DESCRIPTION OF EMBODIMENTS

[0043] The terms used in the present invention includes the following definitions.

[0044] The term “antibody” of the invention represents antibodies derived from genes (generally referred to as antibody genes) encoding the entire or a partial of a heavy chain variable region, a heavy chain constant region, a light chain variable region, and a light chain constant region, which together constitute an immunoglobulin. The antibody of the present invention includes an antibody of any immunoglobulin class and subclass.

[0045] The “human antibody” means an antibody comprising a sequence encoding a human-derived antibody gene and can be obtained from a technology, such as Phage Display, Yeast Display, or the like using a human B-cell hybridoma, a humanized SCID mouse, a mouse expressing a human antibody gene or a human antibody gene library. The “humanized antibody” represents an antibody in which parts of the antibody sequence obtained from animals other than humans are grafted with a human antibody sequence (Emmanuelle Laffy et al., Human Antibodies 14, 33-55, 2005).

[0046] The “heavy chain” represents a polypeptide having a higher molecular weight of two kinds of polypeptides (H chain and L chain) which constitute an immunoglobulin molecule. The heavy chain determines a class and a subclass of an antibody. Each of IgG1, IgG2, IgG4, IgA1, IgA2, IgM, IgD and IgE, has a different constant region of the heavy chain in the amino acid sequence.

[0047] The “light chain” represents a polypeptide having a lower molecular weight of two kinds of polypeptides (H chain and L chain) which constitute an immunoglobulin molecule. In the case of human antibodies, there are two kinds of light chains, referred to as κ and λ.

[0048] The “variable region” (also referred to as a V region) represents a highly-diverse region in an amino acid sequence which generally exists at an N-terminal side of immunoglobulin. The other part of the immunoglobulin has a structure with a poor diversity, and thereby is referred to as a “constant region” (also referred to as a C region). The variable regions of a heavy chain and a light chain form a complex and the complex determines the property of an antibody against an antigen. As for a heavy chain of a human antibody, the amino acid sequence at position 1 to 117 of the EU index by Kabat et al. (Kabat et al., Sequences of proteins of immunological interest 1991 Fifth edition) corresponds to the variable region, and the constant region starts from the amino acid at position 118. As for a light chain of a human antibody, the amino acid sequence at position 1 to 107 of the EU index by Kabat et al. corresponds to the variable region, and the constant region starts from the amino acid at position 108. In the following description, a heavy chain variable region or a light chain variable region is simply referred to as VH or VL, respectively.

[0049] The “antigen recognition site” is a site which recognizes an antigen and forms a three-dimensional structure complementary to an antigen determinant (epitope). The antigen recognition site can induce a strong molecular interaction with an antigen determinant. Examples of the antigen recognition site include a heavy chain variable region (VH) and a light chain variable region (VL) which comprise at least three complementary determining regions (simply referred to as CDR). In a human antibody, each of the heavy chain variable region and the light chain variable region has three complementary determining regions (CDRs) and antigen recognition sites. These CDRs are referred to as CDR1, CDR2, and CDR3, respectively in the order of position from the N-terminal side.

[0050] The “multivalent antibody” represents an antibody comprising at least two or more antigen recognition sites in a heavy chain and/or a light chain. Each of the antigen recognition sites may recognize the same antigen determinant or may recognize different antigen determinants.

[0051] The multivalent antibody of the present invention is a multivalent antibody in which multiple heavy chain variable regions of antibody are linked to each other via an immunoglobulin domain or a fragment thereof.

[0052] The multivalent antibody of the present invention is specifically characterized in that (a) multiple (such as 2 to 5) different antigen recognition sites are comprised in one heavy chain polypeptide, and the antigen recognition sites are separated and are not close to each other, (b) the antigen recognition sites are linked in tandem via a polypeptide linker comprising 10 amino acids or more, preferably 50 amino acids or more, and more preferably 50 to 500 amino acids, specifically, for example, the antigen recognition sites are linked by a linker having the entire or a partial of an amino acid sequence of an immunoglobulin domain, (c) the antigen recognition site in a light chain forms a complex with the corresponding antigen recognition site in a heavy chain, (d) the multivalent antibody has an antibody structure comprising two heavy chain polypeptides and at least four light chain polypeptides as shown in FIG. 1, a disulfide bond which links the two heavy chain polypeptides in these hinge region, and a disulfide bond which links the light chain polypeptide with the heavy chain polypeptide, (e) the constant region of the heavy chain comprises the entire or a partial of the constant region of a native antibody heavy chain (such as a CH1 fragment, CH1, CH2, CH3, CH1-hinge, CH1-hinge-CH2, CH1-hinge-CH2-CH3, or the like) and the like.

[0053] More specifically, FIG. 1 illustrates both a linker structure and an example of the structure of a multivalent antibody.

[0054] The “immunoglobulin domain” represents a peptide comprising an amino acid sequence similar to that of immunoglobulin and comprising approximately 100 amino acid residues including at least two cysteine residues. Examples of the immunoglobulin domain include VH, CH1, CH2, and CH3 of an immunoglobulin heavy chain, and VL and CL of an immunoglobulin light chain. In addition, the immunoglobulin domain is found in proteins other than immunoglobulin. Examples of the immunoglobulin domain in proteins other than immunoglobulin include an immunoglobulin domain included in a protein belonging to an immunoglobulin super family, such as a major histocompatibility complex (MHC), CD1, B7, T-cell receptor (TCR), and the like. Any of the immunoglobulin domains can be used as an immunoglobulin domain for the multivalent antibody of the present invention.

[0055] An antibody which recognizes a single antigen is defined as a monoclonal antibody.

[0056] The monoclonal antibody is an antibody which is secreted by an antibody-producing cell of a single clone, recognizes only one epitope (also referred to as an antigen determinant), and has a uniform amino acid sequence (primary structure) constituting the monoclonal antibody.

[0057] Examples of the epitope include a single amino acid sequence, a three-dimensional structure comprising the amino acid sequence, a sugar chain-bound amino acid sequence, a three-dimensional structure comprising a sugar chain-bound amino acid sequence, and the like, recognized and bound by a monoclonal antibody.

[0058] A highly flexible amino acid region called a “hinge region” exists between CH1 and CH2.

[0059] In a human antibody, CH1 means a region having the amino acid sequence at positions 118 to 215 of the EU index. Similarly, the hinge region represents a region having the amino acid sequence at positions 216 to 230 of the EU index, CH2 represents a region having the amino acid sequence at positions 231 to 340 of the EU index, and CH3 represents a region having the amino acid sequence at positions 341 to 446 of the EU index.

[0060] “CL” represents a constant region of a light chain. In the case of a κ chain of a human antibody, CL represents a region having the amino acid sequence at positions 108 to 214 of the EU index by Kabat et al. In a λ chain, CL represents a region having the amino acid sequence at positions 108 to 215.

[0061] The “linker” represents a chemical structure which links two antigen recognition sites. The linker is preferably a polypeptide.

[0062] Preferable examples of the linker used for the multivalent antibody of the present invention include a linker having the entire or a partial of the amino acid sequence of the immunoglobulin domain, a linker having the entire or a partial of the amino acid sequence of a linker comprising multiple immunoglobulin domains.

[0063] The amino acid sequence selected from the immunoglobulin domain may be intermittent or continuous, but is preferably the continuous amino acid sequence. In the present invention, examples of preferable linker include a polypeptide comprising 10 or more amino acids, preferably 14 or more amino acids, more preferably 50 or more amino acids, such as comprising 50 or more amino acids to 500 or less amino acids.

[0064] In the present invention, it is possible to appropriately combine the entire or a partial of fragments of an amino acid sequence of CH1, hinge, CH2, and CH3 of an antibody to use as a linker. In addition, an amino acid sequence in which the above amino acid sequence is partially deleted or in which the order of amino acid is changed also can be used.

[0065] Examples of the immunoglobulin domain and the fragment thereof used for the multivalent antibody of the present invention include an immunoglobulin domain comprising CH1-hinge-CH2-CH3 (in the order from N-terminal to C-terminal), an immunoglobulin domain comprising CH1-hinge-CH2, an immunoglobulin domain comprising CH1-hinge, an immunoglobulin domain comprising CH1, a fragment comprising the N-terminal side of CH1, CH1 fragment comprising 14 amino acid residue in which the amino acid at position 14 of CH1 is Cys, CH1 fragment comprising 14 amino acid residue from the N-terminal side of CH1 and the one in which one or more amino acid residues in the amino acid sequence of these immunoglobulin domain fragments are substituted, though it is not particularly limited.

[0066] The immunoglobulin domain and the fragment thereof may be derived from any one of the subclasses selected from the immunoglobulin subclasses IgD, IgM, IgG1, IgG2, IgG3, IgG4, IgA1, IgA1 and IgE, and preferably derived from IgG or IgM.

[0067] In the present invention, specific examples of the immunoglobulin domain and the fragment thereof include an immunoglobulin domain comprising CH1, hinge, CH2, and CH3 and represented by SEQ ID NO:99, an immunoglobulin domain comprising CH1, hinge, and CH2 and represented by the amino acid sequence at positions 1 to 219 of SEQ ID NO:99, an immunoglobulin domain comprising CH1 and hinge and represented by the amino acid sequence at positions 1 to 94 of SEQ ID NO:99, and an immunoglobulin domain comprising CH1 and represented by SEQ ID NO:77.

[0068] In addition, in the present invention, examples of the CH1 fragment include the CH1 fragment represented by any one of SEQ ID NOs:362 to 375, the CH1 fragment comprising 14 amino acid residues in which the amino acid at position 14 of CH1 is Cys and the CH1 fragment comprising 14 amino acid residues of the N-terminal side of CH1, and more specifically, the CH1 fragment represented by any one of SEQ ID NO:311 and SEQ ID NOs:334 to 361.

[0069] Examples of the multivalent antibody of the present invention include a multivalent antibody comprising two or more heavy chain variable regions linked via the above-mentioned immunoglobulin domain or the fragment thereof. When three or more heavy chain variable regions are linked to each other, different immunoglobulin domains or the fragments thereof may be used, or the same immunoglobulin domains and the fragments thereof may also be used. In addition, when two or more heavy chain variable regions are linked to each other, it is possible to change the length or the kind of the immunoglobulin domain or the fragment thereof such that each VH can bind to a specific antigen.

[0070] In the present invention, the light chain variable regions included in the multivalent antibody may be the same light chain variable regions or different light chain variable regions. The heavy chain variable region of the multivalent antibody which can bind to two or more antigens and the same light chain variable regions can be appropriately selected by using a method such as Phage Display such that each antibody variable region can bind to a specific antigen.

[0071] The antigen to which the multivalent antibody of the present invention binds is not particularly limited. Examples of the antigen include an antigen which is associated with a disease relating to an abnormal cell growth, such as a cancer, an autoimmune disease, an allergy disease, and the like, and an antigen involved in organ regeneration and tissue regeneration; and the multivalent antibody of the present invention can be bound to those two or more different antigens or epitopes. That is, the multivalent antibody of the present invention can be bound to two different antigens or two different epitopes existing in one antigen. In addition, since the multivalent antibody of the present invention can activate or inactivate the antigen after binding thereto, it is possible to select the antigen suitable for a target disease. Hereinafter, antigens which may be a target of the multivalent antibody of the present invention will be exemplified. However, the antigens are not limited thereto.

[0072] The antigen in which apoptosis is induced by binding of the antibody includes cluster of differentiation (hereinafter “CD”) 19, CD20, CD21, CD22, CD23, CD24, CD37, CD53, CD72, CD73, CD74, CDw75, CDw76, CD77, CDw78, CD79a, CD79b, CD80 (B7.1), CD81, CD82, CD83, CDw84, CD85, CD86 (B7.2), human leukocyte antigen (HLA)-Class II, epidermal growth factor receptor (EGFR) and the like.

[0073] The antigen participating in formation of pathologic state of tumor or the antigen for the antibody which regulates immunological function includes CD40, CD40 ligand, B7 family molecule (CD80, CD86, CD274, B7-DC, B7-H2, B7-H3, B7-H4), ligand of B7 family molecule (CD28, CTLA-4, ICOS, PD-1, BTLA), OX-40, OX-40 ligand, CD137, tumor necrosis factor (TNF) receptor family molecule (DR4, DR5, TNFR1, TNFR2), TNF-related apoptosis-inducing ligand receptor (TRAIL) family molecule, receptor family of TRAIL family molecule (TRAIL-R1, TRAIL-R2, TRAIL-R3, TRAIL-R4), receptor activator of nuclear factor kappa B ligand (RANK), RANK ligand, CD25, folic acid receptor 4, cytokine [IL-1α, IL-1β, IL-4, IL-5, IL-6, IL-10, IL-13, transforming growth factor (TGF) β, TNFα, etc.], receptors of these cytokines, chemokine (SLC, ELC, I-309, TARC, MDC, CTACK, etc.), receptors of these chemokines, vascular endothelial growth factor (VEGF), Angiopoietin, fibroblast growth factor (FGF), EGF, platelet-derived growth factor (PDGF), insulin-like growth factor (IGF), hepatocyte growth factor (HGF), erythropoietin (EPO), TGFβ, IL-8, Ephilin, SDF-1 and receptors of them.

[0074] The antigen involved in angiogenesis in the pathologic part and organ or tissue regeneration includes vascular endothelial growth factor (VEGF), angiopoietin, fibroblast growth factor (FGF), EGF, platelet-derived growth factor (PDGF), insulin-like growth factor (IGF), erythropoietin (EPO), TGFβ, IL-8, Ephilin, SDF-1, receptors thereof and the like.

[0075] In the present invention, the effector activation of the multivalent antibody can be controlled as follows.

[0076] An effector activity of a monoclonal antibody obtained by the method of the present invention can be controlled by various methods. For example, known methods are a method for controlling an amount of fucose (hereinafter, referred to also as “core fucose”) which is bound N-acetylglucosamine (GlcNAc) through α-1,6 bond in a reducing end of a complex type N-linked sugar chain which is bound to asparagine

[0077] (Asn) at position 297 of an Fc region of an antibody (WO2005/035586, WO2002/31140, and WO00/61739), a method for controlling an effector activity of a monoclonal antibody by modifying amino acid group(s) of an Fc region (constant region comprising CH2 and CH3 domains) of the antibody, and the like. The effector activity of the multivalent antibody of the present invention can be controlled by using any of the methods.

[0078] The “effector activity” means an antibody-dependent activity which is induced via an Fc region of an antibody. As the effector activity, an antibody-dependent cellular cytotoxicity (ADCC activity), a complement-dependent cytotoxicity (CDC activity), an antibody-dependent phagocytosis (ADP activity) by phagocytic cells such as macrophages or dendritic cells, and the like are known.

[0079] In addition, by controlling a content of core fucose of a complex type N-linked sugar chain of Fc of an antibody, an effector activity of the multivalent antibody can be increased or decreased. As a method for lowering a content of fucose which is bound to a complex type N-linked sugar chain bound to Fc of the antibody, an antibody to which fucose is not bound can be obtained by the expression of an antibody using a CHO cell which is deficient in a gene encoding α-1,6-fucosyltransferase. The antibody to which fucose is not bound has a high ADCC activity. On the other hand, as a method for increasing a content of fucose which is bound to a complex type N-linked sugar chain bound to Fc of the multivalent antibody, a multivalent antibody to which fucose is bound can be obtained by the expression of an antibody using a host cell into which introduce a gene encoding α-1,6-fucosyltransferase. The antibody to which fucose is bound has lower ADCC activity than an antibody to which fucose is not bound.

[0080] Further, by modifying amino acid residue(s) in an Fc region of a multivalent antibody, the ADCC activity or CDC activity can be increased or decreased. For example, the CDC activity to a multivalent antibody can be increased by using the amino acid sequence of the Fc region described in US2007/0148165. Further, the ADCC activity or CDC activity can be increased or decreased by modifying the amino acid as described in U.S. Pat. No. 6,737,056, 7,297,775 or 7,317,091.

[0081] Moreover, it is possible to obtain a multivalent antibody, in which the effector activation of the multivalent antibody is controlled by applying the above-mentioned methods in combination to one multivalent antibody.

[0082] In a DNA sequence encoding the multivalent antibody of the present invention, it becomes more easily to change the sequence of the heavy chain variable region and the linker variously by introducing a restriction enzyme site between the heavy chain variable region and the linker.

[0083] The stability of the multivalent antibody of the present invention can be evaluated by measuring an amount of aggregate (oligomer) formed in the sample which is in the purification process or preserved under a constant condition. That is, when the aggregate amount is decreased under the same condition, it is determined that the stability of the antibody is improved. The aggregate amount can be measured by separating aggregated antibody from antibody that has not been aggregated, using an appropriate chromatography method including gel-filtration chromatography. The method of measuring the aggregate amount will be exemplified in Example 18.

[0084] The productivity of the multivalent antibody of the present invention can be evaluated by measuring an amount of the antibody in culture medium produced from an antibody-producing cell. More specifically, the productivity can be evaluated by measuring the amount of the antibody contained in culture supernatant which has been obtained by removing producing cells from the culture medium using an appropriate method, such as an HPLC method, and an ELISA method. The method of measuring the productivity will be exemplified in Example 17.

[0085] In regard to the antibody of the present invention, it is possible to determine the animal of origin to be used for the variable region and the constant region of the heavy chain and the light chain depending on the target animals to be used and purposes of the use. For example, when a target animal is a human, it is possible to select human origin or mouse origin for a variable region, human origin for the constant region, and human origin for a linker.

[0086] In this specification, “animals” generally represents mammals including human, monkey, chimpanzee, mouse, rat, cattle, pig, goat, sheep, camel, bird, and the like.

[0087] Although specific examples of the antibody of the present invention will be described in the following Examples, the antibody of the present invention also includes derivatives of the antibody. The derivative includes substitution, deletion, addition, and/or insertion of 1 to about 30 amino acids, preferably of 1 to several amino acids, (such as, 1 to 10, preferably 1 to 5, more preferably 1 to 3 amino acids) in the amino acid sequence of the antibody of the present invention. Examples of the amino acid substitution include a conservative amino acid substitution, and this substitution means a substitution between amino acids which have similar electric charges, polarities (or hydrophobic properties), or side chains with similar structures. Examples of the above amino acid group include basic amino acids (Lys, Arg, His), acidic amino acids (Asp, Glu), polar amino acids with no charge (Gly, Asn, Gln, Ser, Thr, Tyr, Cys), nonpolar amino acids (Ala, Val, Leu, Ile, Pro), aromatic amino acids (Phe, Trp, Tyr, His), and the like.

[0088] Moreover, the antibody of the present invention may be chemically modified. Examples of the modification includes pegylation, acetylation, amidation, phosphorylation, glucosylation, and the modification can generally be performed via a functional group such as an amino group, a carboxyl group, a hydroxyl group, or the like. Alternatively, the antibody of the present invention may be conjugated with a medical or diagnostic material. The medical or diagnostic material is not particularly limited. Examples include a peptide, a polypeptide, a nucleic acid, a small molecule, an inorganic element, an inorganic molecule, an organic molecule, and the like. The medical material is a material which can exhibit a therapeutic efficacy for a target site in a body. Examples include an anticancer agent, an anti-virus agent, and the like. Examples of the diagnostic material include a radioisotope. A covalent bonding, non-covalent bonding, biotin/avidin (or streptavidin) system, and the like can be used for the conjugation. Alternatively, the antibody of the present invention may be fixed to a solid phase (for example, resin, plastic, paper, metal) such as a plate, a bead, a test strip and an array.

[0089] Hereinafter, a detailed description will be made of a method for producing the multivalent antibody. However, the method for producing the antibody is not limited thereto.

[0090] (1) Method for Producing Monoclonal Antibody

[0091] In the present invention, the following preparation steps are included in the process for producing the antibody.

[0092] Namely, (1) purifying antigen to be used as immunogen and/or producing a cell which excessively expresses antigen on the cell surface, (2) immunizing an animal with the antigen, followed by collecting the blood to test the antibody titer, determining the timing for enucleation of such as spleen, and preparing an antibody-producing cell, (3) preparing a myeloma cell (hereinafter, referred to as a “myeloma”), (4) producing a hybridoma using the cell fusion between the antibody-producing cell and the myeloma, (5) selecting hybridoma groups which produce target antibodies, (6) separating into single-cell clones (cloning), and the like.

[0093] Hereinafter, the method for producing the monoclonal antibody is described in detail in line with the above-mentioned steps. However, the method for producing the antibody is not limited thereto, and it is also possible to use an antibody-producing cell other than splenic cells and a myeloma. In addition, it is also possible to use an antibody derived from animal serum.

[0094] (1-1) Purification of Antigen

[0095] An antigen protein may be used as it is, or antigen protein may be used in a form of a fusion protein by fusing with another appropriate polypeptide. Examples of the fusion protein include a fusion protein of an extracellular region of antigen protein with an Fc region of human IgG or a glutathioneS-transferase (GST). The above fusion protein can be obtained by preparing an expression vector for animal cells comprising a nucleotide sequence encoding the fusion protein of an extracellular region of antigen with a constant region of human IgG or a GST, introducing the expression vector into the animal cells, and purifying the from the culture supernatant of the obtained transformant. In addition, purified antigen itself which expresses on a cellular membrane of a human cell line is also used as an antigen.

[0096] (1-2) Preparation Step of Antibody-Producing Cell

[0097] The antigen obtained in (1-1) is mixed with complete or incomplete Freund's adjuvant or an additive agent such as aluminum potassium sulfate and immunized with an experimental animal as an immunogen. As the experimental animal, for example, a mouse can be used. A transgenic mouse having an ability to produce an antibody of human origin is most preferably used, and such a mouse is described in a literature by Tomizuka et al. (Tomizuka. et al., Proc Natl Acad Sci USA., 2000 Vol 97:722).

[0098] The administration method of the immunogen at the time of mouse immunization may be any one selected from hypodermic injection, intraperitoneal injection, intravenous injection, intradermal injection, intramuscular injection, footpad injection, and the like. Among them, intraperitoneal injection, footpad injection, or intravenous injection is preferably used.

[0099] The immunization may be performed once or performed repeatedly at an appropriate interval (preferably at an interval from three days to one week). Thereafter, the antibody titer against the antigen in the serum of the immunized animal is measured. If an animal of which the antigen titer has been sufficiently increased is used as a supply source of the antibody-producing cell, it is possible to enhance the efficiency of the following operations. Generally, an antibody-producing cell derived from an animal after three to five days from the last immunization is preferably used for the following cell fusion.

[0100] As a method of measuring the antibody titer used here, various known techniques such as a radioimmunoassay method (hereinafter referred to as an “RIA method”), an enzyme linked immunosorbent assay method (hereinafter referred to as an “ELISA method”), a fluorescence antibody method, and a passive hemagglutination method can be used.

[0101] When the ELISA method is used, the antibody titer in the present invention can be measured by the following steps. First, purified or partially purified antigen is put into a solid phase surface of such as a 96-well plate for ELISA to absorb, the surface of the solid phase to which the antigen is not absorbed is covered with protein having no relation with the antigen, such as bovine serum albumin (hereinafter, referred to as a “BSA”), the surface is washed and then allowed to contact with a sample (for example, a mouse serum) as a primary antibody which has been serially diluted, and then the antibody in the sample is bound to the antigen. Furthermore, the antibody titer is calculated by adding an enzyme-labeled antibody against human antibody as a secondary antibody to be bound to the human antibody. After washing the resulting object, a substrate of the enzyme is added to measure the variation of the absorbance due to the chromogen caused by the substrate degradation.

[0102] (1-3) Preparation of Myeloma Cell

[0103] As a myeloma, a cell which is derived from a mouse, a rat, a guinea pig, a hamster, a rabbit, a human or the like and does not have an ability of producing autoantibody can be used. Generally, as myeloma cells, a cell line obtained from mouse can be used. Examples include 8-azaguanine-resistant mouse (derived from BALB/c mouse) myeloma cell line P3X63Ag8U.1 (P3-U1) [Yelton D. E. et al., Current Topics in Microbiology and Immunology, 81, 1-7 (1978)], P3/NS1/1-Ag4-(NS-1) [Kohler G et al., European J Immunology, 6, 511-519 (1976)], Sp2/0-Ag14 (SP-2) [Shulman M. et al., Nature, 276, 269-270 (1978)], P3X63Ag8.653 (653) [Kearney J. F. et al., Immunology, 123, 1548-1550 (1979)], P3X63Ag8 (X63) [Horibata K. and Harris A. W. et al., Nature, 256, 495-497 (1975)] and the like. These cell lines are subcultured in an appropriate medium, such as an 8-azaguanine medium [a medium in which 8-azaguanine is added to RPMI-1640 medium containing glutamine, 2-mercaptoethanol, gentamicin and fetal calf serum (hereinafter referred to as FCS)], Iscove's Modified Dulbecco's Medium (hereinafter referred to as IMDM) and Dulbecco's Modified Eagle Medium (hereinafter referred to as DMEM), and they are subcultured in the normal medium (for example, DMEM including 10% FCS) 3 or 4 days before cell fusion to ensure the cell number of 2×10⁷ or more on the day for fusion.

[0104] (1-4) Cell Fusion

[0105] The antibody-producing cell is a plasma cell or a lymphocyte which is a precursor thereof and may be obtained from any parts of the individual. Generally, the antibody-producing cell can be obtained from spleen, lymph node, marrow, tonsils, peripheral blood, or a combination thereof. The splenic cell is most generally used.

[0106] After the last immunization, a part in which the antibody-producing cells exist, for example, spleen is excised from the experimental animal (for example, a mouse) in which a predetermined antibody titer has been attained, and splenic cells as antibody-producing cells are prepared. The most generally used method for fusing these splenic cells with the myeloma obtained in the step (3) is a method using polyethylene glycol since it causes relatively low cell cytotoxicity and operations for fusion are easy. For example, this method includes the following steps.

[0107] The splenic cells and the myeloma are sufficiently washed with serum-free culture medium (for example, DMEM) or phosphate buffered saline (hereinafter, referred to as “phosphate buffer”) and mixed to give a ratio of the splenic cells: the myeloma cells=5:1 to 10:1, followed by centrifugation. After the supernatant is removed, the deposited cell group is sufficiently loosened. Then, serum-free culture medium containing 1 mL of 50% (w/v) polyethylene glycol (molecular weight: 1000 to 4000) is dropped thereto while stirring the resulting object. Thereafter, 10 mL of serum-free culture medium is slowly added, and then the resulting mixture is centrifuged. The supernatant is removed again, the deposited cells are suspended in an appropriate amount of normal culture medium (hereinafter, referred to as a “HAT culture medium”) containing hypoxanthine aminopterin thymidine (hereinafter, referred to as “HAT”) solution and human interleukin-2 (hereinafter, referred to as “IL-2”) and dispensed into respective wells in a culture plate (hereinafter, referred to as a “plate”) to culture at 37° C. under 5% carbon dioxide for approximately two weeks. The HAT culture medium is appropriately supplemented during the culture.

[0108] (1-5) Selection Hybridoma Group

[0109] When the above-mentioned myeloma cells are an 8-azaguanine-resistant line, namely, the myeloma cells are a hypoxanthine-guanine phosphoribosyltransferase (HGPRT) deficient cell line, the not fused myeloma cells and the fusion cells between the myeloma cells cannot exist in the HAT-containing culture medium. Accordingly, it is possible to select the hybridoma by continuing to culture within the HAT-containing culture medium.

[0110] The culture medium in which the hybridoma is grown in a colony-shape is changed from the HAT culture medium to a culture medium from which aminopterin is removed (hereinafter, referred to as an “HT culture medium”). Thereafter, a part of the culture supernatant is collected, and the antibody titer is measured by such as the ELISA method.

[0111] As described above, although the method of using the 8-azaguanine-resistant cell line is exemplified, other cell lines can be used depending on the selecting method of the hybridoma.

[0112] (2) Method for Producing Multivalent Antibody

[0113] In the present invention, the multivalent antibody can be prepared by, for example, cloning genes of multiple monoclonal antibodies against different epitopes which are expressed from the hybridoma obtained as described above, determining antigen recognition sites and designing a gene of the multivalent antibody containing the obtained antigen recognition sites. More specifically, the nucleotide sequence of the multivalent antibody comprising the obtained antigen recognition sites and linker are appropriately combined is synthesized and incorporated into an expression plasmid.

[0114] Here, the linker links an antigen recognition site and another antigen recognition site, is generally constituted by a polypeptide of 10 amino acids or more, preferably of 50 amino acids or more, and more preferably includes 50 amino acids to 500 amino acids. In the embodiment of the present invention, a more preferable linker is a linker consisting of CH1 of a human antibody heavy chain constant region or a linker comprising CH1 such as a linker constituted by CH1-hinge-CH2-CH3 as shown in FIG. 1. Specifically, the former linker has an amino acid sequence represented by SEQ ID NO:77, and the latter linker has an amino acid sequence represented by SEQ ID NO:99.

[0115] In addition, examples of the expression plasmid include pTracer-CMV/Bsd, pTracer-EF/Bsd, pTracer-SV40 (Invitrogen by Life Technologies Corporation), and the like.

[0116] The expression plasmid is introduced into an appropriate producing cell (for example, animal cells such as CHO cells), and the obtained transformant is cultured as multivalent antibody-producing cells. The multivalent antibody can be purified from the culture medium. Hereinafter, a detailed description will be made of a method for producing the multivalent antibody. However, the producing method of the multivalent antibody is not limited to the following description. Examples of a method for producing the multivalent antibody include a method in which the expression plasmid is expressed in an animal to express the multivalent antibody in serum or milk of the animal, a method in which the multivalent antibody is produced by chemically synthesizing a peptide, or the like.

[0117] (2-1) Cloning of Hybridoma

[0118] The hybridoma, which has been proved to prepare a specific antibody by measuring the antibody titer in the same manner as that described in (1-2), is moved to another plate to perform cloning. Examples of the cloning method include a limiting dilution method in which a hybridoma is diluted and cultured such that one hybridoma is contained in one well in the plate, a soft agar method in which a hybridoma is cultured in a soft agar culture medium to collect the colony, a method of picking up each one of the cells separately using a micro-manipulator to culture the cells, a “sorter clone” in which one cell is separated using a cell sorter, and the like. However, the limiting dilution method is a simple method and frequently used.

[0119] The cloning using such as the limiting dilution method is carried out to repeatedly 2 to 4 times to the well in which the antibody titer has been observed, and for the cell in which the antibody titer is continuously observed is selected as a monoclonal antibody-producing hybridoma.

[0120] (2-2) Producing Antibody-Producing Cell

[0121] A gene encoding a heavy chain and a light chain of an antibody is cloned from the antibody-producing cells such as the hybridoma which produces the antibody for each antigen. When a multivalent antibody is prepared using a single light chain, an antibody heavy chain optimized for the single light chain is selected by performing screening such as the phage display method so that the antibody variable region comprised in the multivalent antibody reacts with a specific antigen. A nucleotide sequence encoding the variable region of the selected heavy chain is linked with the linker sequence of the immunoglobulin domain or the fragment thereof used in the multivalent antibody of the present invention, and thereby the nucleotide sequence encoding the multivalent antibody heavy chain is prepared. The thus-prepared nucleotide sequence encoding the multivalent antibody heavy chain and a nucleotide sequence encoding the single light chain are inserted into an appropriate protein-expression vector to prepare a multivalent antibody expression vector. On the other hand, when multiple light chains which are different for each antigen are used, the nucleotide sequence encoding the multiple antibody heavy chain variable region is linked via the linker sequence for the immunoglobulin domain or the fragment thereof used for the multivalent antibody of the present invention to prepare the nucleotide sequence encoding the multivalent antibody heavy chain. The nucleotide sequences encoding the heavy chain and the light chain of the multivalent antibody may be inserted into a single expression vector as a tandem type multivalent antibody expression vector, or may be inserted into different expression vectors as a separate type of multivalent antibody expression vector. Then, the prepared multivalent antibody expression vector is introduced into a host (for example, mammal cells, Escherichia coli, yeast cells, insect cells, plant cells, or the like), and thereby a recombinant antibody prepared using a recombinant technology can be prepared (P. J. Deives. ANTIBODY PRODUCTION ESSENTIAL TECHNIQUES., 1997 WILEY; P. Shepherd and C. Dean. Monoclonal Antibodies., 2000 OXFORD UNIVERSITY PRESS; J. W. Goding, Monoclonal Antibodies: principles and practice. 1993 ACADEMIC PRESS).

[0122] Examples of the vector include phage, plasmid, a virus, an artificial chromosome, and the like, which can autonomously reproduce in the host. Examples of the plasmid DNA include plasmids derived from Escherichia coli, Bacillus subtilis, or yeast origin and the like. Examples of the phage DNA include λ phage, T7-phage, M13-phage and the like. Examples of the virus vector include adenovirus, adeno-associated virus, retrovirus, lentivirus and the like. Examples of the artificial chromosome include a mammal artificial chromosome (MAC) including a human artificial chromosome (HAC), a yeast artificial chromosome (YAC), a bacterial artificial chromosome (such as BAC, PAC) and the like.

[0123] The host to be used for the transformation is not particularly limited as long as it can express a targeted gene. Examples of the host include bacteria (Escherichia coli, Bacillus subtilis, or the like), yeast, animal cells (such as COS cells, CHO cells), insect cells and the like.

[0124] The method of introducing a gene into the host is known. An arbitrary method (such as a method using calcium ion, an electroporation method, a spheroplast method, a lithium acetate method, a calcium phosphate method, a lipofection method) can be used. In addition, examples of the method of introducing a gene to an animal include a method of introducing the gene into pluripotent cells such as embryonic stem (ES) cells, induced pluripotent stem (iPS) cells, or the like using a method such as a microcell method, a microinjection method, an electroporation method, and a lipofection method; and a nuclear transplantation method; and the like. In such a case, a transgenic animal can be produced by introducing pluripotent cells into a blastocyst and then implanting the obtained blastocyst to a uterus of a host.

[0125] Accordingly, the transformant containing the gene encoding the multivalent antibody of the present invention includes not only a cell but also an animal.

[0126] The multivalent antibody can be produced by synthesizing a gene encoding a multivalent antibody in which multiple antigen recognition sites and a linker are appropriately combined and incorporating the gene into an appropriate expression plasmid. The antigen recognition site can be obtained by specifying and separating the appropriate antigen recognition site using a technique such as a phage display method, a yeast display or the like as well as the above-mentioned method using the hybridoma (Emmanuelle Laffy et al., Human Antibodies 14, 33-55, 2005).

[0127] (2-3) Expressing and Purification of Multivalent Antibody

[0128] According to the present invention, the multivalent antibody can be obtained by culturing the transformant and collecting from the culture thereof. The “culture” means all of (a) the culture supernatant, (b) culture cells, culture bacterial bodies, or fragments thereof, and (c) the secretions of the transformant. When the transformant is cultured, a culture medium suitable for a host to be used is selected, and a stationary culture method, a culture method using a roller bottle, or the like is applied.

[0129] When the targeted protein is produced in a bacterial body or a cell after culturing, the antibody is collected by disrupting the bacterial body or the cell. When the targeted antibody is produced outside of the bacterial body or the cell, the culture solution is used as it is or used after removing the bacterial bodies or the cells by centrifugation or the like. Thereafter, the targeted antibody can be isolated and purified from the culture using single general biochemical method or an appropriate combination of general biochemical methods by means of various types of chromatography used for isolation and purification of proteins.

[0130] (3) Method of Determining Antigen Recognition Site

[0131] The identification of the recognition epitope of the monoclonal antibody can be carried out as follows. First, various partial structures of a molecule to be recognized by the monoclonal antibody are produced. In producing the partial structures, a method such as a method of producing various partial peptides of the molecule using a known oligopeptide synthesizing method, a method for producing the targeted partial peptide inside and outside of the host such as Escherichia coli by incorporating the nucleotide sequence encoding the targeted partial peptides into a suitable expression plasmid using a recombination technology can be used. However, both the methods are generally combined to use for the above purpose. For example, after preparing a series of polypeptides which are sequentially shortened to have an appropriate length from the C-terminal or the N-terminal of the antigen protein, using the recombination technology known by those skilled in the art, the reactivity of the monoclonal antibody against the series of polypeptides are examined to roughly determine the recognition site.

[0132] Thereafter, various oligopeptide, mutant thereof or the like in the corresponding part are further synthesized using an oligopeptide synthesizing technique known by those skilled in the art. Then the epitope can be confined by examining the binding property of the monoclonal antibody which is contained in a preventative agent or the therapeutic agent of the present invention as an effective ingredient against those peptides or by examining an competitive inhibitory activity of the peptide on the binding of the monoclonal antibody and the antigen. As a simple method for obtaining various oligopeptides, a commercially available kit (such as SPOTs kit (manufactured by Genosys Biotechnologies, Inc.), or a series of multipin peptide synthesis kit using a multipin synthesis method (manufactured by Chiron Corporation), or the like) can be used.

[0133] (4) Method of Antigen Binding Test

[0134] In the present invention, the test for binding of the antibody to the antigen can be carried out by using analysis by means of a flow cytometry using antigen expressing cells and a detection method utilizing a surface plasmon resonance using a soluble antigen as well as the ELISA method using the soluble antigen described in Example 19.

### EXAMPLES

[0135] Hereinafter, the present invention will be described in detail with Examples of the multivalent antibody. However, it is needless to say that the present invention is not limited to these Examples.

[0136] In addition, antibodies of animals such as human and mouse and the sequences of the genes thereof can be used those registered in a gene bank such as GenBank.

### Example 1

[0137] Preparation of First Antigen Recognition Site

[0138] In order to obtain a first antigen recognition site, anti-CD40 antibody disclosed in WO02/088186 was used. Specifically, a light chain and a heavy chain of the antibody (hereinafter, simply referred to as 341-1-19) produced by hybridoma KM341-1-19 (Accession No. BP-7759) was used. Hybridoma KM341-1-19 has been deposited with the National Institute of Advanced Industrial Science and Technology, International Patent Organism Depositary (AIST Tsukuba Central 6, 1-1-1 Higashi, Tsukuba, Ibaraki 305-8566 Japan).

[0139] Each of the full-length DNA sequence (SEQ ID NO:1) and the amino acid sequence (SEQ ID NO:2) of the 341-1-19 heavy chain, the DNA sequence (SEQ ID NO:3) and the amino acid sequence (SEQ ID NO:4) of the 341-1-19 light chain variable region is shown in the Sequence Listing.

[0140] The translation initiation site of the heavy chain nucleotide sequence is ATG codon starting with adenine (A) at position 50 from the 5′-terminal of SEQ ID NO:1, and the termination codon is TGA starting with thymine (T) at position 1472. The boundary between the antibody variable region and the constant region is placed between adenine (A) at position 493 from the 5′-terminal and guanine (G) at position 494. In the heavy chain amino acid sequence, the H chain variable region is from the N-terminal of SEQ ID NO:2 to serine (S) residue at position 148, and the constant region is from alanine (A) at position 149. The H chain signal sequence was estimated to be from the N-terminal of SEQ ID NO:2 to serine (S) at position 20 by gene sequence estimation software (Signal P ver. 2). It is considered that the N-terminal of the mature protein is glutamine (Q) at position 21 of SEQ ID NO:2.

[0141] The translation initiation site of the light chain nucleotide sequence is ATG codon starting with A at position 29 from the 5′-terminal of SEQ ID NO:3, and the variable region is from the 5′-terminal to adenine (A) at position 400. In the amino acid sequence, the variable region is from the N-terminal of SEQ ID NO:4 to lysine (K) at position 124. It became apparent from the analysis on the N-terminal of purified L chain protein that the L chain signal sequence is from the N-terminal to glycine (G) at position 20 in SEQ ID NO. 4 and that the N-terminal of the mature protein was glutamic acid (E) at position 21 in SEQ ID NO:4.

### Example 2

[0142] Immunization to obtain Second Antigen Recognition Site

[0143] In order to obtain a second antigen recognition site, an anti-human CD28 antibody was obtained.

[0144] The immunization for obtaining the anti-CD28 antibody was carried out in accordance with the method in WO02/088186 which is the method for obtaining the above-mentioned anti-CD40 antibody. Recombinant Human CD28/Fc Chimera (manufactured by R&D system) and MPL+TDM EMULSION (RiBi, manufactured by Sigma-Aldrich, Inc) were mixed at a ratio of 1:1 to immunize a mouse in its right abdominal cavity at 40 μg/mouse. The immunization was carried out three times for every 14 days. In addition, the mouse was immunized with the same antigen three days before harvesting the spleen.

### Example 3

[0145] Preparation of scFV Library of Anti-CD28 Antibody comprising the Same Light Chain as that of Anti-CD40 Antibody

[0146] In order to carry out screening an anti-CD28 antibody comprising the same light chain as that of the anti-CD40 antibody 341-1-19 in Example 1, a library of a single-chain antibody fragment (scFV) in which a heavy chain variable region gene fragment of anti-CD28 antibody is bound to a light chain variable region gene fragment of anti-CD28 antibody, was produced using the spleen of the mouse which was immunized with CD28 produced in Example 2.

[0147] The spleen was surgically excised from the immunized mouse, 3 mL of TRIzol Reagent (manufactured by Invitrogen by Life Technologies Corporation) was added thereto, and tissues were then minced by Polytron. Total RNA was extracted from the solution after mince in accordance with the attached explanatory leaflet. Then, cDNA was synthesized by means of Super Script III First-Stand Synthesis System (manufactured by Invitrogen by Life Technologies Corporation) using mRNA which was purified from the Total RNA with oligotex-dT30 (super) mRNA purification kit (manufactured by Takara Bio Inc) as a template. In addition, in the synthesis of cDNA, Random Hexamers included in the kit were used as primers.

[0148] Then, the PCR was carried out using DNA polymerase (KOD-Plus, manufactured by Toyobo Co. Ltd.) by repeating 35 cycles of a reaction at 95° C. for 30 seconds, at 58° C. for 30 seconds, and at 68° C. for 1 minute as one cycle to amplify a 341-1-19 heavy chain variable region gene fragment in which the SfiI sequence was added to the 5′-terminal and a glycine-rich sequence added to the 3′-terminal while using the heavy chain (SEQ ID NO:1) of 341-1-19 as a template and 5′-GCAACTGCGGCCCAGCCGGCCATGGCCCAGGTGCAGCTGCAGGAG-3′ (SEQ ID NO:5) and 5′-CCGAGGCGCGCCCACCGCTGCCACCGCCTCCTGAGGAGACGGTGACCGT-3′ (SEQ ID NO:6) as primers, and to amplify of a 341-1-19 light chain variable region gene fragment in which a glycine-rich sequence added to the 5′-terminal and the Nod sequence added to the 3′-terminal while using the light chain of 341-1-19 (SEQ ID NO:3) as a template and the 5′-CGGTGGGCGCGCCTCGGGCGGAGGTGGTTCAGAAATTGTGTTGACACAG-3′ (SEQ ID NO:7) and 5′-CATTCTCGAGTTGCGGCCGCACGTTTGATATCCACTTTGGTC-3′ (SEQ ID NO:8) as primers, respectively. The glycine-rich sequences used in the present invention are shown as SEQ ID NOs:9 and 10. The AscI restriction site was inserted into this glycine-rich sequence. The thus-obtained VH and VL gene fragments were linked to each other by means of Over Extension PCR using the glycine-rich sequence which was added by PCR, to obtain 341-1-19 scFv gene fragment. This gene fragment was digested with SfiI and NotI and inserted into a pCANTAB5E vector (manufactured by GE Healthcare Bio-sciences Ltd) which had been digested in advance with SfiI and NotI. The obtained plasmid was named pCANTAB5E/341-1-19. Since the purpose of the present invention is to obtain an antibody for an antigen of Human CD28 comprising the same amino acid sequence as that of the light chain of 341-1-19, this plasmid was digested with SfiI and AscI (to remove the gene region encoding VH of 341-1-19), and thereafter, the vector gene which had been dephosphorylated with Alkaline Phosphatase (BAP, manufactured by Takara Bio Inc) to use as a library-producing vector.

[0149] The heavy chain variable region gene fragment for producing a phage antibody library was prepared using cDNA derived from the immunized mouse spleen as a template. As a first step, the PCR was carried out by repeating 30 cycles of reaction at 95° C. for 30 seconds, at 58° C. for 30 seconds, and at 68° C. for 30 seconds as one cycle using cDNA as a template and using a primer (one of SEQ ID NOs:11 to 35) specific to the signal region of the human heavy chain and a primer (SEQ ID NO:36) specific to the IgG constant region, and using DNA polymerase (KOD-Plus, manufactured by Toyobo Co. Ltd). As a second step, the PCR was carried out by repeating 35 cycles of reaction at 95° C. for 30 seconds, at 58° C. for 30 seconds, and at 68° C. for 30 seconds as one cycle using these PCR products as templates, using a primer (one of SEQ ID NOs:37 to 56) specific to the variable region of the human heavy chain and a primer (one of SEQ ID NOs:57 to 61) specific to Junction region, and using DNA polymerase (KOD-Plus, manufactured by Toyobo Co. Ltd). In addition, the primer specific to the variable region was selected in accordance with the primer specific to the variable region and used in PCR in the first step, and 5 types of primers specific to the Junction region (the combination of the primers specific to the variable region and the PCR products in the first step is shown in Table 1) were mixed and used for the primer. In addition, the restriction site of SfiI was inserted into the 5′-terminal of each nucleotide sequence represented by any one of SEQ ID NOs:37 to 56, and the restriction site of AscI and the linker sequence were inserted into the 5′-terminal of each nucleotide sequence represented by any one of SEQ ID NOs:57 to 61.

TABLE 1
Combination of the Primers Used for Producing Phage Library

| PCR Reaction (First Step) | | PCR Reaction (Second Step) | |
|---|---|---|---|
| | Primer | | Primer |
| IgG | specific to | Variable | Specific to |
| Signal | IgG Constant | Region | Junction |
| Sequence Primer | Region | Primer | Region |
| SEQ ID NO: 11 | SEQ ID NO: | SEQ ID NO: 37 | SEQ ID NO: 57 + |
| SEQ ID NO: 11 | 36 | SEQ ID NO: 38 | SEQ ID NO: 58 + |
| SEQ ID NO: 12 | | SEQ ID NO: 39 | SEQ ID NO: 59 + |
| SEQ ID NO: 13 | | SEQ ID NO: 40 | SEQ ID NO: 60 + |
| SEQ ID NO: 14 | | SEQ ID NO: 41 | SEQ ID NO: 61 |
| SEQ ID NO: 15 | | SEQ ID NO: 37 | |
| SEQ ID NO: 16 | | SEQ ID NO: 42 | |
| SEQ ID NO: 11 | | SEQ ID NO: 43 | |
| SEQ ID NO: 17 | | SEQ ID NO: 44 | |
| SEQ ID NO: 18 | | SEQ ID NO: 45 | |
| SEQ ID NO: 19 | | SEQ ID NO: 46 | |
| SEQ ID NO: 20 | | SEQ ID NO: 47 | |
| SEQ ID NO: 21 | | SEQ ID NO: 48 | |
| SEQ ID NO: 22 | | SEQ ID NO: 46 | |
| SEQ ID NO: 21 | | SEQ ID NO: 46 | |
| SEQ ID NO: 23 | | SEQ ID NO: 46 | |
| SEQ ID NO: 21 | | SEQ ID NO: 49 | |
| SEQ ID NO: 24 | | SEQ ID NO: 47 | |
| SEQ ID NO: 25 | | SEQ ID NO: 46 | |
| SEQ ID NO: 26 | | SEQ ID NO: 46 | |
| SEQ ID NO: 27 | | SEQ ID NO: 46 | |
| SEQ ID NO: 28 | | SEQ ID NO: 46 | |
| SEQ ID NO: 29 | | SEQ ID NO: 50 | |
| SEQ ID NO: 29 | | SEQ ID NO: 52 | |
| SEQ ID NO: 30 | | SEQ ID NO: 51 | |
| SEQ ID NO: 31 | | SEQ ID NO: 50 | |
| SEQ ID NO: 32 | | SEQ ID NO: 50 | |
| SEQ ID NO: 33 | | SEQ ID NO: 53 | |
| SEQ ID NO: 34 | | SEQ ID NO: 54 | |
| SEQ ID NO: 35 | | SEQ ID NO: 55 | |
| SEQ ID NO: 31 | | SEQ ID NO: 56 | |

[0150] The VH gene fragments amplified by PCR were mixed, digested with SfiI and AscI, and then inserted into the library-producing vector by carrying out the reaction at 16° C. overnight using a DNA Ligation Kit (manufactured by Takara Bio Inc). This ligation solution was introduced into TG1 Electroporation Competent Cells (manufactured by SRATAGENE) by electroporation. The transformed Escherichia coli was subjected to shaking culture at 30° C. for one hour in 2×YTAG culture medium (which was prepared by dissolving 17 g of Bactro-tryptone, 10 g of Bact-yeast extract, and 5 g of NaCl with distilled water to be 1 L, and then autoclaving followed by adding 100 μg/mL of ampicilin and 2% glucose thereto), then seeded on an SOBAG culture medium plate (which was prepared by dissolving 20 g of Bactro-tryptone, 5 g of Bact-yeast extract, 15 g of Bacto-agar, 0.5 g of NaCl in 900 mL of distilled water, then autoclaving followed by cooling to 50 to 60° C. to be added 10 mL of sterile 1 M MgCl₂, 55.6 mL of sterilized 2 M glucose and Ampicilin) prepared using a standard dish (150×15 mm, manufactured by Becton, Dickinson and Company), and then incubated at 30° C. overnight. The colonies grown on the culture medium were collected (colonies were collected from 3 mL of 2×YTAG culture medium per one plate) as the scFv antibody library. In this Example, approximately 5×10⁵ colonies were collected to produce the library.

[0151] The scFv antibody library (100 μL) was subjected to shaking culture on 2×YTAG culture medium (50 mL) at 30° C. until the absorbance at 600 nm reached from 0.3 to 0.5. This culture solution was infected with M13KO helper phage at an MOI of 10 to 20 (subjected to shaking culture at 30° C. for 1 hour), then the culture medium was changed to 2×YTAK (which was prepared by dissolving 17 g of Bacto-tryptone, 10 g of Bact-yeast extract, and 5 g of NaCl with distilled water to 1 L and then autoclaving followed by adding 100 μg/mL of ampicilin and 50 μg/mL of kanamycin), and then the resultant was subjected to shaking culture at 30° C. overnight. The culture supernatant was used as the antibody phage library. The antibody phage library was precipitated with PEG (prepared by adding distilled water to 200 g of polyethylene glycol 8000 and 146.1 g of NaCl to dissolve them to 1 L, followed by autoclaving) and the solution was substituted for 3 mL of PBS (−).

### Example 4

### Preparation of Human-CD28 Antigen

[0152] The human-CD28 (SEQ ID NO:62) was amplified by carrying out 35 cycles of reaction at 95° C. for 30 seconds, at 55° C. for 30 seconds, and at 68° C. for 1 minute as one cycle using Human Spleen Marathon Ready cDNA (Clontech Laboratories Inc) as a template and 5′-ATGCTCAGGCTGCTCTTGGCTCTCAACTTATTC-3′ (SEQ ID NO:63) and 5′-TCAGGAGCGATAGGCTGCGAAGTCGCG-3′ (SEQ ID NO:64) as primers, and using DNA polymerase (KOD-Plus, manufactured by Toyobo Co. Ltd). The expression vector of Fc fusion protein (CD28-FC) of the human-CD28 extracellular domain (SEQ ID NO:65) with IgG was prepared using the above gene fragment as a template. The gene fragment of the human-CD28 extracellular region was obtained, and PCR to add the KpnI sequence to the 5′-terminal and an XbaI sequence to the 3′-terminal, respectively, was carried out. In practice, PCR was carried out by repeating 35 cycles of reaction at 95° C. for 30 seconds, at 55° C. for 30 seconds, and at 68° C. for 30 seconds as one cycle using the human-CD28 cDNA as a template, 5′-GGGGGTACCATGCTCAGGCTGCTCTTGGCTC-3′ (SEQ ID NO:66) and 5′-GGGTCTAGACCAAAAGGGCTTAGAAGGTCCG-3′ (SEQ ID NO:67) as primers and using DNA polymerase (KOD-Plus, manufactured by Toyobo Co. Ltd). The gene fragment amplified by this PCR was digested with Kpnl and Xbal and inserted into pTracer-CMV/Zeo (Invitrogen by Life Technologies Corporation) into which the Fc region of human IgG was inserted in advance. The thus obtained plasmid was named pTracer/hECD28-Fc.

[0153] The prepared expression vector plasmid was obtained using Nucleobomd PC2000EF (manufactured by Macherey-NAGEL GmbH & Co. KG) and introduced into nonadherent 293 cells using FreeStyle™ 293 Expression System (Invitrogen by Life Technologies Corporation), and thereby the culture supernatant containing each antibody was obtained by transient expression. The culture supernatant was collected after 7 days from the introduction of the vector and filtered with a membrane filter (manufactured by Millipore Corporation) having a pore diameter of 0.22 μm. This culture supernatant was charged in an antibody-purifying affinity column, HiTrap rProtein A FF (column volume 1 mL) (manufactured by GE Healthcare Bio-sciences Ltd), washed with PBS (−), eluted with buffer of 20 mM sodium citrate and 50 mM NaCl buffer (pH 2.7), and the eluted solution was collected into a tube with 200 mM sodium phosphate buffer (pH 7.0). Thereafter, the obtained solution was charged with the column in which Q-Sepharose (Hitrap Q HP, manufactured by GE Healthcare Bio-sciences Ltd) was linked to SP-Sepharose (HiTrap SP FF, manufactured by GE Healthcare Bio-sciences Ltd) to be absorbed onto the columns and washed with 20 mM sodium phosphate buffer (pH 5.0) to elute with 1×PBS buffer. The eluate was filtered and sterilized with a membrane filter having a pore diameter of 0.22 μm (Millex-GV, manufactured by Millipore Corporation), and thereby recombinant Fc fusion protein was obtained. The concentration of the purified human-CD28-Fc fusion protein was calculated using the absorbance at 280 nm.

### Example 5

[0154] Concentration of Phage displaying scFv Antibody which recognizes Human-CD28

[0155] The Human-CD28-Fc fusion protein was prepared to give a concentration of 10 μg/mL with coating buffer (50 mM carbonate buffer, pH 9), then added to the Maxisorp Immuno Tube (star tube type, manufactured by Nalge Nunc International) and incubated at 4° C. overnight to be immobilized. Then, to the tube, 500 mL of blocking reagent (SuperBlock (registered trademark) Blocking Buffer, manufactured by Pierce Protein Research) was added and incubated at a room temperature for 1 hour, so as to be blocked. The resulting tube was washed three times with Washing buffer (0.1% Tween20-TBS). The antibody phage library was incubated with 2 mL of block Ace (manufactured by Dainippon Sumitomo Pharma Co. Ltd) at a room temperature for 2 hours. The obtained antibody phage library was added to the washed tube, and then incubated at room temperature for 2 hours. The resulting tube was washed 10 times with Washing buffer and then eluted with 0.1 M Glycine-HCl solution (pH 2.2). Then, to the eluted solution, 2 M Tris-base solution was added for neutralization. Thus eluted phage was infected again with TG1, and the infected TG1 was seeded on the 2×YTAG culture medium plate followed by incubation at 30° C. overnight. The colonies grown on the culture medium were recovered again to carry out panning a total of three times in accordance with the above method.

### Example 6

[0156] Selection of Antibody Display Phage which recognizes Human-CD28 and Production of Anti-CD28 Antibody (341VL34 and 341VL36)

[0157] Each single colony obtained from the antibody library to which the panning had been applied was seeded in 200 μL of 2×YTAG culture medium and subjected to a shaking culture at 30° C. for 4 to 5 hours. Then, 200 μL of 1×10¹⁰ pfu/mL M13KO helper phage was added to the culture solution for the infection (the shaking culture at 30° C. for 1 hour). After changing the culture medium to 2×YTAK, the shaking culture was carried out at 30° C. overnight. The binding property to the antigen was examined by the following steps (ELISA) using this culture supernatant as a phage solution.

[0158] The human-CD28-Fc fusion protein was diluted with Coating buffer (50 mM carbonate buffer, pH 9) to give a concentration of 2 μg/mL. The obtained solution was put into the Maxisorp Plate (manufactured by Nalge Nunc International) at 50 μL/well and incubated at 4° C. overnight to be immobilized. Then, to the well, 200 μL/well of blocking reagent (SuperBlock (registered trademark) Blocking Buffer, manufactured by Pierce Protein Research) was added, the resulting object was incubated at a room temperature for 30 minutes to complete the blocking. To the well, 50 μL/well of each phage solution was added, and incubated at a room temperature for 1 hour. Each well was washed three times with Washing buffer (0.1% Tween20-TBS). After diluting HRP/Anti-E Tag conjugate (manufactured by GE Healthcare Bio-sciences Ltd) with assay diluent (0.1% Tween20-TBS containing 10% Block Ace manufactured by Dainippon Sumitomo Pharma Co. Ltd), 50 μL/well of the diluted HRP/Anti-E Tag conjugate was added to the each wells followed by incubation at room temperature for 1 hour. After washing each well three times with Washing buffer, 50 μL of TMB (manufactured by Dako) chromogenic substrate solution was added to each well, and incubated in a dark room at a room temperature. After developing color, 0.5 M vitriol (50 μL/well) was added to stop the reaction. The absorbance at the wavelength of 450 nm was measured with a microplate reader (SPECTRAMAX190, manufactured by Molecular Devices Inc).

[0159] Two scFv antibodies which were found to bind to the antigen in the ELISA were named 341VL34 scFv and 341VL36 scFv, respectively. In order to change the obtained scFV antibody to the normal type antibody, gene of the antibody was cloned to prepare the expression vector.

[0160] The heavy chain gene fragment was amplified by carrying out 30 cycles of reaction at 95° C. for 30 seconds, at 58° C. for 30 seconds, and at 68° C. for 30 seconds as one cycle using pCANTAB/341VL34 or pCANTAB/341VL36 as a template and 5′-AAAGGTGTCCAGTGTGAGGTGCAGCTGGTGGAGTC-3′ (SEQ ID NO:68) and 5′-TGAGGAGACGGTGACCGTGG-3′ (SEQ ID NO:69) as primers and using DNA polymerase (KOD-Plus, manufactured by Toyobo Co. Ltd). PCR was carried out to add the SalI sequence, the Kozac sequence, and the sequence encoding the signal to the 5′-terminal and to add the NheI sequence to the 3′-terminal using each obtained gene fragment as a template. PCR was carried out 35 cycles of reaction at 95° C. for 30 seconds, at 58° C. for 30 seconds, and at 68° C. for 30 seconds as one cycle using the respective heavy chain gene fragments as a template and 5′-GGGGTCGACACCATGGAGTTTGGGCTGAGCTGGGTTTTCCTTGTTGCTATTT TAAAAGGTGTCCAGTGT-3′ (SEQ ID NO:70) and 5′-GGGGCTAGCTGAGGAGACGGTGACC-3′ (SEQ ID NO:71) as primers and using DNA polymerase (KOD-Plus, manufactured by Toyobo Co. Ltd). Since each of the light chains of 341VL34 scFv and 341VL36 scFv has the same amino acid sequence as that of 341-1-19, the heavy chain variable region of the 341-1-19 expression vector (which is the same as N5KG2Ser disclosed in Japanese Patent Application No. 2003-431408) was cut out with SalI and NheI, and each of the heavy chain gene fragments prepared by digesting 341VL34scFv and 341VL36scFv with SalI and NheI was inserted. The antibody comprising a light chain of 341-1-19 (SEQ ID NO:2) and a heavy chain derived from 341VL34scFv was named 341VL34, and the antibody comprising a light chain of 341-1-19 (SEQ ID NO:2) and a heavy chain derived from 341VL36scFv was named 341VL36.

[0161] Each of 341VL34 heavy chain nucleic acid sequence (SEQ ID NO:72), 341VL34 heavy chain amino acid sequence (SEQ ID NO:73), 341VL36 heavy chain nucleic acid sequence (SEQ ID NO:74), and 341VL36 heavy chain amino acid sequence (SEQ ID NO:75) is shown in the Sequence Listing.

[0162] The translation initiation site of the 341VL34 antibody heavy chain nucleic acid is ATG codon starting with adenine (A) at position 1 from the 5′-terminal of SEQ ID NO:72, and the termination codon is TGA starting with thymine (T) at position 1417. The boundary between the antibody variable region and the constant region is placed between adenine (A) at position 438 and guanine (G) at position 439 from the 5′-terminal. In the amino acid sequence, the heavy chain variable region is from the N-terminal of SEQ ID NO:73 to serine (S) residue at position 146, and the constant region is from alanine (A) at position 147. It is considered that the heavy chain signal sequence is from the N-terminal of SEQ ID NO:73 to cysteine (C) at position 19 and that the N-terminal of the mature protein is glutamic acid (E) at position 20.

[0163] The translation initiation site of the 341VL36 antibody heavy chain nucleic acid is ATG codon starting with adenine (A) at position 1 from the 5′-terminal of SEQ ID NO:74, and the termination codon is TGA starting from thymine (T) at position 1417. The boundary between the antibody variable region and the constant region is placed between adenine (A) at position 438 and guanine (G) at position 439 from the 5′-terminal. In the amino acid sequence, the heavy chain variable region is from the N-terminal of SEQ ID NO:75 to the serine (S) residue at position 146, and the constant region is from alanine (A) at position 147. It is considered that the heavy chain signal sequence is from the N-terminal of SEQ ID NO:75 to cysteine (C) at position 19 and that the N-terminal of the mature protein is glutamic acid (E) at position 20.

### Example 7

[0164] Structure of Produced Multivalent Antibody

[0165] The structural characteristics of the multivalent antibody produced in the present invention are shown in FIG. 1. The variable regions derived from two antibodies are linked via a linker. Using one antibody (341-1-19) as anti-CD40 antibody and two antibodies (341VL34 and 341VL36) as anti-CD28 antibody, an antibody in which the combinations of the structure and the position of the linkers were changed was produced to be examined. As the linker of the multivalent antibody in the Examples, the linker represented by SEQ ID NO:77 comprising the CH1 region of IgG2 subclass derived from 341-1-19 or the linker represented by SEQ ID NO:99 comprising the CH1, hinge, CH2, and CH3 regions was inserted. However, the linker used in the present invention is not limited to these linkers.

[0166] Table 2 shows the structures of the produced multivalent antibodies.

TABLE 2
Structures of Multivalent Antibodies

| | Name of | Name of | | |
|---|---|---|---|---|
| | Antibody | Antibody | | |
| Name of | Used | Used | SEQ ID | Amino Acid |
| Multivalent | at N-terminal | at C-terminal | NO of | Length of |
| Antibody | Side | Side | Linker | Linker |
| 341VL34-CH1-341 | 341VL34 | 341-1-19 | 76, 77 | 100 |
| 341-CH1-341VL34 | 341-1-19 | 341VL34 | 76, 77 | 100 |
| DVD341VL34-341 | 341VL34 | 341-1-19 | 87, 88 | 6 |
| 341VL34-CH1-H- | 341VL34 | 341-1-19 | 98, 99 | 328 |
| CH2-CH3-341-CH1 | | | | |
| 341VL36-CH1-341 | 341VL36 | 341-1-19 | 76, 77 | 100 |
| 341-CH1-341VL36 | 341-1-19 | 341VL36 | 76, 77 | 100 |
| DVD341VL36-341 | 341VL36 | 341-1-19 | 87, 88 | 6 |
| 341VL36-CH1-H- | 341VL36 | 341-1-19 | 98, 99 | 328 |
| CH2-CH3-341-CH1 | | | | |

### Example 8

[0167] Preparation of Expression Vector of Multivalent Antibody (341VL34-CH1-341) comprising Antigen Recognition Site for CD28 (341VL34 Origin) at N-terminal Side, Antigen Recognition Site for CD40 (341-1-19 Origin) at C-terminal Side and Linker represented by SEQ ID NO:77

[0168] In order to produce the multivalent antibody comprising the recognition site for CD28 and the recognition site for CD40 in a row in order from the heavy chain N-terminal side, the heavy chain variable region of anti-CD28 antibody 341VL34 was linked in tandem to the heavy chain variable region of anti-CD40 antibody 341-1-19 via the linker (SEQ ID NO:77). Since the same light chain as that of 341-1-19 was used for an anti-CD28 antibody, the expression vector comprised one type of light chain sequence. This multivalent antibody was named 341VL34-CH1-341.

[0169] The sequence (SEQ ID NO:76 and 77) comprising the CH1 sequence (positions 118 to 215 of the EU index of Kabat) and the BamHI sequence (GGATCC) at its 3′-terminal was inserted as a linker between the heavy chains (3′-terminal of 341VL34 heavy chain, 5′-terminal of 341-1-19 heavy chain).

[0170] The gene sequence encoding the heavy chain of 341VL34-CH1-341 was prepared by the following steps.

[0171] The linker gene fragment with the NheI sequence added to the 5′-terminal was amplified by carrying out 30 cycles of reaction at 95° C. for 30 seconds, at 55° C. for 30 seconds, and at 68° C. for 30 seconds as one cycle using the heavy chain sequence of 341-1-19 as the template and 5′-GGGGCTAGCACCAAGGGCCCATC-3′ (SEQ ID NO:78) and 5′-GGATCCAACTGTCTTGTCCACCTTGG-3′ (SEQ ID NO:79) as primers and using DNA polymerase (KOD-Plus, manufactured by Toyobo Co. Ltd). The heavy chain gene fragment of 341-1-19 with the linker gene (21 bases from 3′-terminal side) added to the 5′-terminal and with NheI sequence added to 3′-terminal was amplified by carrying out 30 cycles of reaction at 95° C. for 30 seconds, at 55° C. for 30 seconds, and at 68° C. for 30 seconds was performed as one cycle using the heavy chain sequence of 341-1-19 as a template and 5′-GTGGACAAGACAGTTGGATCCCAGGTCCAACTGCAGCAGTC-3′ (SEQ ID NO:80) and 5′-CTTGGTGCTAGCTGAGGAGACGGTGAC-3′ (SEQ ID NO:81) as primers and using DNA polymerase (KOD-Plus, manufactured by Toyobo Co. Ltd). The thus obtained two gene fragments were linked with Over Extension PCR, and thereby the gene fragment of linker-341-1-19 heavy chain was prepared. This gene fragment was digested with NheI and then inserted into the 341VL4 expression vector which had been dephosphorylated with Alkaline Phosphatase (BAP, manufactured by Takara Bio Inc) after digesting with NheI.

[0172] Each of 341VL34-CH1-341 heavy chain nucleic acid sequence (SEQ ID NO:82) and 341VL34-CH1-341 heavy chain amino acid sequence (SEQ ID NO:83) is shown in the Sequence Listing.

### Example 9

[0173] Preparation of Expression Vector of Multivalent Antibody (341-CH1-341VL34) Comprising Antigen Recognition Site for CD40 (341-1-194 Origin) at N-terminal Side, Antigen Recognition Site for CD28 (341VL34 Origin) at C-terminal Side and Linker represented by SEQ ID NO:77

[0174] In order to produce the multivalent antibody comprising the antigen recognition site for CD40 and the antigen recognition site for CD28 in a row in order from the heavy chain N-terminal side, the heavy chain variable region of 341-1-19 was linked in tandem to the heavy chain variable region of 341VL34 via the linker (SEQ ID NO:77). The same light chain as that of 341-1-19 was used for an anti-CD28 antibody. The sequence (SEQ ID NO:76 and 77) comprising CH1 sequence (positions 118 to 215 of the EU index of Kabat) and the BamHI sequence (GGATCC) added to its 3′-terminal was inserted as a linker between the heavy chains (3′-terminal of 341VL34 heavy chain, 5′-terminal of 341-1-19 heavy chain). This antibody was named 341-CH1-341VL34.

[0175] The gene sequence encoding the heavy chain of 341-CH1-341VL was prepared by the following steps.

[0176] The linker gene fragment with the NheI sequence added to the 5′-terminal was amplified by carrying out 30 cycles of reaction at 95° C. for 30 seconds, at 55° C. for 30 seconds, and at 68° C. for 30 seconds as one cycle using the heavy chain of 341-1-19 as the template and 5′-GGGGCTAGCACCAAGGGCCCATC-3′ (SEQ ID NO:78) and 5′-GGATCCAACTGTCTTGTCCACCTTGG-3′ (SEQ ID NO:79) as primers and using DNA polymerase (KOD-Plus, manufactured by Toyobo Co. Ltd). The heavy chain gene fragment of 341-1-19 with the linker gene (21 bases from 3′-terminal) added to the 5′-terminal and with NheI sequence added to the 3′-terminal was amplified by carrying out 30 cycles of reaction at 95° C. for 30 seconds, at 55° C. for 30 seconds, and at 68° C. for 30 seconds as one cycle using the heavy chain sequence of 341VL-34 as a template and 5′-GTGGACAAGACAGTTGGATCCGAGGTGCAGCTGGTGGAGTC-3′ (SEQ ID NO:84) and 5′-CTTGGTGCTAGCTGAGGAGACGGTGAC-3′ (SEQ ID NO:81) as primers and using DNA polymerase (KOD-Plus, manufactured by Toyobo Co. Ltd). The thus obtained two gene fragments were linked with Over Extension PCR, and thereby the gene fragment of linker-341VL34 heavy chain was prepared. This gene fragment was digested with NheI and then inserted into the 341-1-19 expression vector which had been dephosphorylated with Alkaline Phosphatase (BAP, manufactured by Takata Bio Inc) after digesting with NheI.

[0177] Each of 341-CH1-341VL34 heavy chain nucleic acid sequence (SEQ ID NO:85) and 341-CH1-341VL34 heavy chain amino acid sequence (SEQ ID NO:86) is shown in the Sequence Listing.

### Example 10

[0178] Preparation of Expression Vector of Multivalent Antibody (DVD341VL34-341) comprising Antigen Recognition Site for CD28 (341VL34 Origin) at N-terminal Side, Antigen Recognition Site for CD40 (341-1-19 Origin) at C-terminal Side and Short Linker represented by SEQ ID NO:88 which Links Two Antigen Recognition Sites

[0179] In order to compare the stabilities of the multivalent antibodies, the multivalent antibody in which multiple antigen recognition sites were linked via the linker comprising short amino acid sequence (6 amino acids) was prepared in accordance with the report by Wu et al. (Non-Patent Literature 5). The multivalent antibody using the short linker prepared in accordance with the report by Wu et al. is referred to as DVDIgG. Specifically, the DVDIgG was prepared using anti-CD40 antibody 341-1-19 and anti-CD28 antibody 341VL34. The DVDIgG comprising the antigen recognition site for CD28 and the antigen recognition site for CD40 in order from N-terminal side was named DVD341VL34-341. The 341VL34 variable region was linked in tandem to the N-terminal side of the 341-1-19 heavy chain variable region.

[0180] In regard to the light chain, 341VL34 light chain variable region was linked in tandem to the N-terminal side of the light chain variable region of 341-1-19. A partial sequence (SEQ ID NO:89 and 90: positions 108 to 113 of the EU index of Kabat) of the light chain κ constant region was inserted between the variable regions as a linker.

[0181] The gene sequence encoding the heavy chain of DVD341VL34-341 was prepared by the following steps.

[0182] The heavy chain gene fragment of 341-1-19 with the linker gene sequence (5′-terminal of the linker is the NheI sequence) added to the 5′-terminal and with the NheI sequence added to the 3′-terminal was amplified by carrying out 35 cycles of reaction at 95° C. for 30 seconds, at 55° C. for 30 seconds, and at 68° C. for 30 seconds as one cycle using the heavy chain sequence of 341-1-19 as a template and 5′-GTCTCCTCAGCTAGCACCAAGGGCCCACAGGTCCAACTGCAGCAGTC-3′ (SEQ ID NO:91) and 5′-CTTGGTGCTAGCTGAGGAGACGGTGAC-3′ (SEQ ID NO:81) as primers and using DNA polymerase (KOD-Plus, manufactured by Toyobo Co. Ltd). This gene fragment was digested with NheI and then inserted into the 341VL34 expression vector which had been dephosphorylated with Alkaline Phosphatase (BAP, manufactured by Takara Bio Inc) after digesting with NheI. Furthermore, the light chain prepared by the following method was inserted into this vector.

[0183] The gene sequence encoding the light chain of DVD341VL34-341 was prepared by the following steps.

[0184] The light chain gene fragment of 341-1-19 with the linker gene sequence (5′-terminal of the linker is the BsiWI sequence) added to the 5′-terminal and with the BsiWI sequence added to the 3′-terminal was amplified by carrying out 35 cycles of reaction at 95° C. for 30 seconds, at 55° C. for 30 seconds, and at 68° C. for 30 seconds as one cycle using the 341-1-19 light chain as the template and 5′-GGGCGTACGGTGGCTGCACCAGAAATTGTGTTGACACAGTC-3′ (SEQ ID NO:92) and 5′-GGGCGTACGTTTGATATCCACTTTGGTCC-3′ (SEQ ID NO:93) as primers and using DNA polymerase (KOD-Plus, manufactured by Toyobo Co. Ltd). This gene fragment was digested with BsiWI and then inserted into the expression vector comprising the above-mentioned DVD341VL34-341-1-19 which had been dephosphorylated with Alkaline Phosphatase (BAP, manufactured by Takara Bio Inc) after digesting with BsiWI.

[0185] Each of DVD341VL34-341 heavy chain nucleic acid sequence (SEQ ID NO:94), DVD341VL34-341 heavy chain amino acid sequence (SEQ ID NO:95), DVD341VL34-341 light chain nucleic acid sequence (SEQ ID NO:96), and DVD341VL34-341 light chain nucleic acid sequence (SEQ ID NO:97) is shown in the Sequence Listing.

### Example 11

[0186] Preparation of Expression Vector of Multivalent Antibody (341VL34-CH1-H—CH2-CH3-341-CH1) comprising Antigen Recognition Site for CD28 (341VL34 Origin) at N-terminal Side, Antigen Recognition Site for CD40 (341-1-19 Origin) at C-terminal Side and Linker represented by SEQ ID NO:99

[0187] The multivalent antibody comprising the CD28 recognition site and the CD40 recognition site in order from the heavy chain N-terminal side and comprising the long linker represented by SEQ ID NO:98 or 99 (CH1, hinge, CH2, CH3: positions 118 to 447 of the EU index of Kabat) was prepared. Specifically, the variable region of 341VL34 was linked to the variable region of 341-1-19 via the linker represented by SEQ ID NO:98 or 99. To 3′-terminal, TGA was added as a termination codon. The same light chain as that of 341-1-19 was used for the anti-CD28 antibody. This antibody was named 341VL34-CH1-H—CH2-CH3-341-CH1.

[0188] The gene sequence encoding the heavy chain of 341VL34-CH1-H—CH2-CH3-341-CH1 was prepared by the following steps.

[0189] The linker gene fragment (5′-terminal of the linker is the NheI sequence) with the BamHI sequence added to the 3′-terminal was amplified by carrying out 35 cycles of reaction at 95° C. for 30 seconds, at 55° C. for 30 seconds, and at 68° C. for 30 seconds as one cycle using the 341-1-19 heavy chain sequence as the template and the 5′-GTCTCCTCAGCTAGCACCAAGGGCCCA-3′ (SEQ ID NO:100) and 5′-GGGGGATCCTTTACCCGGAGACAGGGAGAG-3′ (SEQ ID NO:101) as primers and using DNA polymerase (KOD-Plus, manufactured by Toyobo Co. Ltd). The thus obtained gene fragment was digested with NheI and BamI and then inserted into the 341VL34 expression vector by digesting with NheI and BamHI to remove the gene region encoding the heavy chain constant region. PCR was carried out 35 cycles of reaction at 95° C. for 30 seconds, at 55° C. for 30 seconds, and at 68° C. for 30 seconds as one cycle using the 341-1-19 heavy chain as a template and 5′-GATATCAAAGGATCCCAGGTCCAACTGCAGCAGTC-3′ (SEQ ID NO:102) and 5′-GGGGGATCCTCAAACTGTCTTGTCCACCTTGG-3′ (SEQ ID NO:103) as primers and using DNA polymerase (KOD-Plus, manufactured by Toyobo Co. Ltd). The obtained 341-1-19 heavy chain variable region in which the BamHI sequence was added at 5′-terminal end and the BamHI sequence, the termination codon, and the CH1 region (from adenine at position 118 to valine at position 215) (from 3′-terminal) were added at 3′-terminal; and the CH1 region were digested with BamHI and inserted into the 3′-terminal of this expression vector.

[0190] Each of 341VL34-CH1-H—CH2-CH3-341-CH1 heavy chain nucleic acid sequence (SEQ ID NO:104) and 341VL34-CH1-H—CH2-CH3-341-CH1 heavy chain amino acid sequence (SEQ ID NO:105) is shown in the Sequence Listing.

### Example 12

[0191] Preparation of Expression Vector of Multivalent Antibody (341VL36-CH1-341) comprising Antigen Recognition Site for CD28 (341VL36 Origin) at N-terminal Side, Antigen Recognition Site for CD40 (341-1-19 Origin) at C-terminal Side and comprising Linker represented by SEQ ID NO:77

[0192] In order to produce the multivalent antibody comprising the CD28 recognition site and the CD40 recognition site in a row in order from the heavy chain N-terminal side, the heavy chain variable region of 341VL36 was linked to the heavy chain variable region of 341-1-19 in tandem via the linker represented by SEQ ID NO:77. Since the same light chain as that of 341-1-19 is used for the anti-CD28 antibody, the expression vector comprises one light chain sequence. This multivalent antibody was named 341VL36-CH1-341.

[0193] The sequence (SEQ ID NO:76 or 77) comprising CH1 sequence (positions 118 to 215 of the EU index of Kabat) and the BamHI sequence (GGATCC) added to its 3′-terminal was inserted as a linker between the heavy chains (3′-terminal of 341VL34 heavy chain, 5′-terminal of 341-1-19 heavy chain).

[0194] The gene sequence encoding the heavy chain of 341VL34-CH1-341 was prepared by the following steps.

[0195] The linker gene fragment with the NheI sequence added to the 5′-terminal was amplified by carrying out 30 cycles of reaction at 95° C. for 30 seconds, at 55° C. for 30 seconds, and at 68° C. for 30 seconds as one cycle using the 341-1-19 heavy chain sequence as a template and 5′-GGGGCTAGCACCAAGGGCCCATC-3′ (SEQ ID NO:78) and 5′-GGATCCAACTGTCTTGTCCACCTTGG-3′ (SEQ ID NO:79) as primers and using DNA polymerase (KOD-Plus, manufactured by Toyobo Co. Ltd). The reaction at 95° C. for 30 seconds, at 55° C. for 30 seconds, and at 68° C. for 30 seconds was performed over 30 cycles to amplify heavy chain gene fragment of 341-1-19 with the linker sequence (21 bases from 3′-terminal side) added to the 5′-terminal and with the NheI sequence added to the 3′-terminal while using the 341-1-19 heavy chain sequence as a template and 5′-GTGGACAAGACAGTTGGATCCCAGGTCCAACTGCAGCAGTC-3′ (SEQ ID NO:80) and 5′-CTTGGTGCTAGCTGAGGAGACGGTGAC-3′ (SEQ ID NO:81) as primers and using DNA polymerase (KOD-Plus, manufactured by Toyobo Co. Ltd). The thus obtained two gene fragments were linked with Over Extension PCR, and thereby the gene fragment of linker-341-1-19 heavy chain was produced. This gene fragment was digested with NheI and then inserted into the 341VL36 expression vector which had been dephosphorylated with Alkaline Phosphatase (BAP, manufactured by Takara Bio Inc) after digesting with NheI.

[0196] Each of 341VL36-CH1-341 heavy chain nucleic acid sequence (SEQ ID NO:106) and 341VL36-CH1-341 heavy chain amino acid sequence (SEQ ID NO:107) is shown in the Sequence Listing.

### Example 13

[0197] Production of Expression Vector of Multivalent Antibody (341-CH1-341VL36) comprising Antigen Recognition Site for CD40 (341-1-19 Origin) at N-terminal Side and Antigen Recognition Site for CD28 (341VL36 Origin) at C-terminal Side and Linker represented by SEQ ID NO:77

[0198] In order to produce the multivalent antibody comprising the CD40 recognition site and the CD28 recognition site in a row in order from the heavy chain N-terminal side, the heavy chain variable region of 341-1-19 was linked to the heavy chain variable region of 341VL36 in tandem via the linker represented by SEQ ID NO:77. The same light chain as that of 341-1-19 is used for the anti-CD28 antibody. The sequence (SEQ ID NO:76 and 77) with the CH1 sequence (positions 118 to 215 of the EU index of Kabat) and the BamHI sequence (GGATCC) added to its 3′-terminal was inserted between the heavy chains (3′-terminal of 341VL36 heavy chain, 5′-terminal of 341-1-19 heavy chain) as a linker. This antibody was named 341-CH1-341VL36.

[0199] The gene sequence encoding the 341-CH1-341VL36 heavy chain was produced by the following steps.

[0200] The linker gene fragment with the NheI sequence added to the 5′-terminal was amplified by carrying out 30 cycles of reaction at 95° C. for 30 seconds, at 55° C. for 30 seconds, and at 68° C. for 30 seconds as one cycle using the 341-1-19 heavy chain sequence as a template and 5′-GGGGCTAGCACCAAGGGCCCATC-3′ (SEQ ID NO:78) and 5′-GGATCCAACTGTCTTGTCCACCTTGG-3′ (SEQ ID NO:79) as primers and using DNA polymerase (KOD-Plus, manufactured by Toyobo Co. Ltd). The heavy chain gene fragment of 341-1-19 with the linker gene (21 bases from 3′-terminal side) added to the 5′-terminal and with the NheI sequence added to the 3′-terminal was amplified by carrying out 30 cycles of reaction at 95° C. for 30 seconds, at 55° C. for 30 seconds, and at 68° C. for 30 seconds as one cycle using the 341VL36 as the template and 5′-GTGGACAAGACAGTTGGATCCGAGGTGCAGCTGGTGGAGTC-3′ (SEQ ID NO:84) and 5′-CTTGGTGCTAGCTGAGGAGACGGTGAC-3′ (SEQ ID NO:81) as primers and using DNA polymerase (KOD-Plus, manufactured by Toyobo Co. Ltd). The thus obtained two gene fragments were linked with Over Extension PCR, and thereby the gene fragment of linker-341VL36 heavy chain was prepared. This gene fragment was digested with NheI and then inserted into the 341-1-19 expression vector which had been dephosphorylated with Alkaline Phosphatase (BAP, manufactured by Takara Bio Inc) after digesting with NheI.

[0201] Each of 341-CH1-341VL36 heavy chain nucleic acid sequence (SEQ ID NO:108) and 341-CH1-341VL36 heavy chain amino acid sequence (SEQ ID NO:109) is shown in the Sequence Listing.

### Example 14

[0202] Production of Expression Vector of Multivalent Antibody (DVD341VL36-341) comprising Antigen Recognition Site for CD28 (341VL36 Origin) at N-terminal Side, Antigen Recognition Site for CD40 (341-1-19 Origin) at C-terminal Side and Short Linker represented by SEQ ID NO:88 which links Two Antigen Recognition Sites

[0203] In order to compare the stabilities of the multivalent antibodies, the DVD-IgG was produced using 341-1-19 and 341VL36 antibodies in accordance with the report by Wu et al. (Non-Patent Literature 5). The DVDIgG comprising the antigen recognition site for CD28 and the antigen recognition site for CD40 in order from the N-terminal side was named DVD341VL36-341. The 341VL34 variable region was linked in tandem to the N-terminal side of the 341-1-19 heavy chain variable region. The linker comprising 6 amino acids and represented by SEQ ID NO:87 or 88, were inserted between the variable regions.

[0204] As for the light chain, the 341VL36 light chain variable region was linked in tandem to the N-terminal side of the light chain variable region of the 341-1-19. The partial sequence (SEQ ID NO:89 or 90: positions 108 to 113 of the EU index of Kabat) of the light chain κ constant region was inserted as a linker between the variable regions.

[0205] The gene sequence encoding the heavy chain of DVD341VL36-341 was prepared by the following steps.

[0206] The heavy chain gene fragment of the 341-1-19 with the linker gene sequence added to the 5′-terminal and with the NheI sequence added to the 3′-terminal side was amplified by carrying out 35 cycles of reaction at 95° C. for 30 seconds, at 55° C. for 30 seconds, and at 68° C. for 30 seconds as one cycle using the 341-1-19 heavy chain sequence as a template and 5′-GTCTCCTCAGCTAGCACCAAGGGCCCACAGGTCCAACTGCAGCAGTC-3′ (SEQ ID NO:91) and 5′-CTTGGTGCTAGCTGAGGAGACGGTGAC-3′ (SEQ ID NO:84) as primers and using DNA polymerase (KOD-Plus, manufactured by Toyobo Co. Ltd). This gene fragment was digested with NheI and then inserted into the 341VL36 expression vector which had been dephosphorylated with Alkaline Phosphatase (BAP, manufactured by Takara Bio Inc) after digesting with NheI. Furthermore, the light chain which had been prepared by the following method was inserted into this vector.

[0207] The gene sequence encoding the DVD341VL36-341 light chain was prepared by the following steps.

[0208] The light chain gene fragment 341-1-19 with the linker sequence added to the 5′-terminal and with the BsiWI sequence added to the 3′-terminal was amplified by carrying out the reaction at 95° C. for 30 seconds, at 55° C. for 30 seconds, and at 68° C. for 30 seconds was performed over 35 cycles to amplify as one cycle using the 341-1-19 light chain sequence as a template and 5′-GGGCGTACGGTGGCTGCACCAGAAATTGTGTTGACACAGTC-3′ (SEQ ID NO:92) and 5′-GGGCGTACGTTTGATATCCACTTTGGTCC-3′ (SEQ ID NO:93) as primers and using DNA polymerase (KOD-Plus, manufactured by Toyobo Co. Ltd). This gene fragment was digested with BsiWI and then inserted into the expression vector comprising the above-mentioned heavy chain of DVD341VL36-341 which had been dephosphorylated with Alkaline Phosphatase (BAP, manufactured by Takara Bio Inc) after digesting with BsiWI.

[0209] Each of DVD341VL36-341 heavy chain nucleic acid sequence (SEQ ID NO:110), DVD341VL36-341 heavy chain amino acid sequence (SEQ ID NO:111), DVD341VL36-341 light chain nucleic acid sequence (SEQ ID NO:112), and DVD341VL36-341 light chain nucleic acid sequence (SEQ ID NO:113) is shown in the Sequence Listing.

### Example 15

[0210] Production of Expression Vector of Multivalent Antibody (341VL36-CH1-H—CH2-CH3-341-CH1) comprising Antigen Recognition Site for CD28 (341VL34 Origin) at N-terminal Side, Antigen Recognition Site for CD40 (341-1-19 Origin) at C-terminal Side and Linker represented by SEQ ID NO:99

[0211] The multivalent antibody comprising the CD28 recognition site and the CD40 recognition site in order from the heavy chain N-terminal side and comprising the long linker represented by SEQ ID NO:99 was prepared. The heavy chain variable region of 341-1-19 was linked in tandem to the 341VL36 heavy chain variable region via the linker represented by SEQ ID NO:98 or 99. To the 3′-terminal, TGA was added as a termination codon. The same light chain as that of 341-1-19 was used for the anti-CD28 antibody. This antibody was named 341VL36-CH1-H—CH2-CH3-341-CH1.

[0212] The gene sequence encoding the heavy chain of 341VL36-CH1-H—CH2-CH3-341-CH1 was prepared by the following steps.

[0213] The linker gene fragment with the BamHI sequence added to the 3′-terminal was amplified by carrying out 35 cycles of reaction at 95° C. for 30 seconds, at 55° C. for 30 seconds, and at 68° C. for 30 seconds as one cycle using the 341-1-19 heavy chain sequence as a template and 5′-GTCTCCTCAGCTAGCACCAAGGGCCCA-3′ (SEQ ID NO:100) and 5′-GGGGGATCCTTTACCCGGAGACAGGGAGAG-3′ (SEQ ID NO:101) as primers and using DNA polymerase (KOD-Plus, manufactured by Toyobo Co. Ltd). The thus obtained gene fragment was digested with NheI and BamHI and then inserted into the 341VL36 expression vector digested with NheI and BamHI. PCR was carried out 35 cycles of reaction at 95° C. for 30 seconds, at 55° C. for 30 seconds, and at 68° C. for 30 seconds as one cycle using the 341-1-19 heavy chain sequence as a template and 5′-GATATCAAAGGATCCCAGGTCCAACTGCAGCAGTC-3′ (SEQ ID NO:102) and 5′-GGGGGATCCTCAAACTGTCTTGTCCACCTTGG-3′ (SEQ ID NO:103) as primers and using DNA polymerase (KOD-Plus, manufactured by Toyobo Co. Ltd) to prepare the heavy chain variable region of 341-1-19 with the gene sequence added to the BamHI sequence at the 5′-terminal and added to the nucleotide sequence encoding the BamHI sequence, the termination codon, and the CH1 region (Thr at position 118 to valine at position 215) (from the 3′-terminal) at the 3′-terminal and the CH1 region. The obtained gene fragment was digested with BamHI and inserted to the expression vector. Each of 341VL36-CH1-H—CH2-CH3-341-CH1 heavy chain nucleic acid sequence (SEQ ID NO:114) and 341VL36-CH1-H—CH2-CH3-341-CH1 heavy chain amino acid sequence (SEQ ID NO:115) is shown in the Sequence Listing.

### Example 16

[0214] Expression and Purification of Multivalent Antibody

[0215] The produced expression vector gene was prepared using QIAGEN Plasmid Maxi Kit (manufactured by Qiagen) and introduced into nonadherent 293 cells using FreeStyle™ 293 Expression System (Invitrogen by Life Technologies Corporation). The culture supernatant containing the respective antibodies was obtained by transient expression. The culture supernatant was collected 7 days after the introduction of the vector and filtered with a membrane filter (manufactured by Millipore Corporation) having a pore diameter of 0.22 μm. The affinity purification was carried out the culture supernatant using Protein A resin (MabSelect, manufactured by GE Healthcare Bio-sciences Ltd). Phosphate buffer was used as washing buffer, and buffer of 20 mM sodium citrate and 50 mM NaCl (pH 2.7) was used as an elution buffer. The elution fraction was adjusted to be approximately pH 6.0 by adding 200 mM sodium phosphate buffer (pH 7.0). The adjusted antibody solution was substituted with the phosphate buffer using a dialysis membrane (10000 cuts, manufactured by Spectrum Laboratories Inc), filtered and sterilized with a membrane filter having a pore diameter of 0.22 μm (Millex-GV; manufactured by Millipore Corporation) to obtain a purified antibody. In regard to the density of the purified antibody, the absorbance at 280 nm was measured, and the density of 1 mg/mL antibody was assumed to be 1.40 Optimal Density for the calculation.

### Example 17

[0216] Measurement of Antibody Productivity

[0217] The antibody content in each culture supernatant was measured to know the productivity of the antibody. In order to measure the antibody content, the analysis was carried out using a high performance liquid chromatography apparatus (manufactured by Hitachi Ltd) and POROS 50A (manufactured by Applied Biosystems, cat. 4319037) and using 20 mM phosphate and 300 mM NaCl pH 7.0 as a solvent. The antibody content was calculated by comparing the peak areas obtained by injecting each culture supernatant to the peak areas obtained by injecting 1, 2, 5, and 10 μg, respectively, of purified human antibody (IgG1).

[0218] The result is shown in Table 3. It was found from Table 3 that the productivity of a multivalent antibody linked via a shorter linker is lower.

TABLE 3
Productivity of Respective Antibodies

| | Antibody Density | | |
|---|---|---|---|
| | in Culture | | Amino Acid |
| | Supernatant | | Number of |
| Antibody | μg/mL | nM | Linker |
| 341-1-19 | 3.94 | 26.87 | — |
| 341VL34 | 2.5 | 17.23 | — |
| 341VL36 | 2.85 | 19.60 | — |
| 341VL34-CH1-341 | 5.47 | 22.73 | 100 |
| 341-CH1-341VL34 | 6.22 | 25.85 | 100 |
| DVD341VL34-341 | 0.99 | 4.98 | 6 |
| 341VL34-CH1-H-CH2-CH3-341-CH1 | 4.67 | 19.41 | 328 |
| 341VL36-CH1-341 | 6.1 | 25.32 | 100 |
| 341-CH1-341VL36 | 6.47 | 26.85 | 100 |
| DVD341VL36-341 | 1.1 | 5.53 | 6 |
| 341VL36-CH1-H-CH2-CH3-341-CH1 | 4.78 | 19.84 | 328 |

### Example 18

[0219] Evaluation of Antibody Stability

[0220] In order to measure an aggregate content rate of the antibody solution, the analysis was carried out using a high-performance liquid chromatography apparatus (manufactured by Shimadzu Corporation) and TSK-G3000 SW column (manufactured by Tosoh Corporation) and using 20 mM sodium phosphate and 500 mM NaCl pH 7.0 as a solvent. The aggregate content rate was calculated by injecting 40 μg of each antibody to compare the peak position of it to that of a molecular weight marker for gel filtration HPLC (manufactured by Oriental Yeast Co. Ltd, Cat No. 40403701), and specifying the peaks of a monomer of antibody protein and the aggregate other than the antibody protein to calculate the concentration of the aggregate.

[0221] The result is shown in Table 4. It was found from Table 4 that with the shorter linker, more aggregate was generated in the purification process and the stability of the multivalent antibody in the aqueous solution was degraded.

TABLE 4
Aggregate Containing Amount of Respective Purified Antibodies

| | Antibody | Amino Acid |
|---|---|---|
| Antibody | content (%) | Number of Linker |
| 341VL34-CH1-341 | 1.01 | 100 |
| 341-CH1-341VL34 | 2.11 | 100 |
| DVD341VL34-341 | 28.3 | 6 |
| 341VL34-CH1-H-6CH2-CH3-341-CH1 | 0.86 | 328 |

### Example 19

[0222] Evaluation of Antigen Binding Property of Antibody

[0223] The binding property of the prepared antibody comprising two (CD40 and CD28) recognition sites for each antigen was examined by the following steps.

[0224] The human-CD40-Fc fusion protein and the human-CD28-Fc fusion protein were adjusted to give a concentration of 1 μg/mL using coating buffer (50 mM carbonate buffer, pH 9). To a well, 50 μL/well of the obtained human-CD40-Fc fusion protein or the obtained human-CD28-Fc fusion protein was added into the Maxisorp Plate (manufactured by Nalge Nunc International) respectively, and incubated at 4° C. overnight to be immobilized. Then, 200 μL/well of blocking reagent (SuperBlock (registered trademark) Blocking Buffer, manufactured by Pierce Protein Research) was added to the well, followed by incubation at room temperature for 30 minutes for blocking. Then, 50 μL/well of the culture supernatant comprising each antibody obtained in above Examples was added to the well followed by incubation at room temperature for 1 hour. After washing three times with Washing buffer (0.1% Tween20-TBS), Affinity Isolated Antibody HRP Conjugated Goat F(ab)₂ anti-Human κ (manufactured by EY Laboratories Inc) was diluted with assay diluent (0.1% Tween20-TBS containing Block Ace manufactured by Dainippon Sumitomo Pharma Co. Ltd. by 10%). Then, 50 μL of the obtained solution was added to each well followed by incubation at a room temperature for 1 hour. After washing three times with washing buffer, 50 μL of TMB (manufactured by Dako) coloring substrate solution was added to each well, followed by incubation in a dark room at room temperature. After developing color, 0.5 M vitriol (50 μL/well) was added to stop the reaction. The absorbance at the wavelength of 450 nm was measured with a microplate reader (SPECTRAMAX190, manufactured by Molecular Devices Inc).

TABLE 5
Binding of Antibody against Antigen

| | Solid-Phase Antigen | |
|---|---|---|
| Antibody | human CD40 | human CD28 |
| 341-1-19 | ◯ | X |
| 341VL34 | X | ◯ |
| 341VL36 | X | ◯ |
| 341VL34-CH1-341 | ◯ | ◯ |
| 341-CH1-341VL34 | ◯ | ◯ |
| DVD341VL34-341 | ◯ | ◯ |
| 341-CH1-H-CH2-CH3-341VL34-CH1 | ◯ | ◯ |
| 341VL36-CH1-341 | ◯ | ◯ |
| 341-CH1-341VL36 | ◯ | ◯ |
| DVD341VL36-341 | ◯ | ◯ |
| 341VL36-CH1-H-CH2-CH3-341-CH1 | ◯ | ◯ |

### Example 20

[0225] Preparation of First Antigen Recognition Site

[0226] In the same manner as in Example 1, an anti-CD40 antibody 281 was established as a new anti-CD40 antibody.

### Example 21

[0227] Preparation of scFV library of Anti-CD28 Antibody comprising the Same Light Chain as the Light Chain of Anti-CD40 Antibody

[0228] In order to carry out the screening of an anti-CD28 antibody having the same light chain as that of the anti-CD40 antibody 281 in Example 20, a library of a single-chain antibody fragments (scFV) in which the heavy chain variable region gene fragment was linked with the light chain variable region gene fragment of the anti-CD28 antibody, was prepared using the spleen of the CD28 immunized mouse prepared in Example 2.

[0229] The heavy chain variable region gene fragment of the 281 with the SfiI sequence added to the 5′-terminal and with a glycine-rich sequence added to the 3′-terminal was amplified by carrying out the 35 cycles of reaction at 95° C. for 30 seconds, at 58° C. for 30 seconds, and at 68° C. for 1 minute as one cycle using the heavy chain (SEQ ID NO:116) of the 281 as a template and 5′-GCAACTGCGGCCCAGCCGGCCATGGCCCAGGTGCAGCTGCAGGAG-3′ (SEQ ID NO:120) and 5′-CCGAGGCGCGCCCACCGCTGCCACCGCCTCCTGAGGAGACGGTGACCAG-3′ (SEQ ID NO:121) as primers and using DNA polymerase (KOD-Plus, manufactured by Toyobo Co. Ltd). The light-chain variable region gene fragment of the 281 with a glycine-rich sequence added to the 5′-terminal and with the NotI sequence added to the 3′-terminal was amplified using the light chain (SEQ ID NO:118) of the 281 as a template and 5′-CGGTGGGCGCGCCTCGGGCGGAGGTGGTTCAGAAATTGTGTTGACGCAG-3 (SEQ ID NO:122) and 5′-GAGTCATTCTCGACTTGCGGCCGCACGTTTGATCTCCAGTCGTGTCCC-3′ (SEQ ID NO:123) as primers and using DNA polymerase (KOD-Plus, manufactured by Toyobo Co. Ltd). The thus obtained VH was linked with and VL gene fragments with Over Extension PCR in the same manner as in Example 3, and thereby 281 scFv gene fragment was prepared. This gene fragment was digested with SfiI and NotI and inserted into pCANTAB 5E vector (manufactured by GE Healthcare Bio-Sciences Ltd) which had been digested in advance with SfiI and NotI. The obtained plasmid was named pCANTAB5E/281. Since the purpose of this Example is to obtain an antibody for human CD28 as an antigen comprising the same amino acid sequence as that of the light chain of the 281, this plasmid was digested with SfiI and AscI (gene region encoding VH of 341-1-19 was removed). The obtained vector was dephosphorylated with Alkaline Phosphatase (BAP, manufactured by Takara Bio Inc) to be used for a library-producing vector.

[0230] The heavy chain variable region gene fragment for producing the phage antibody library was obtained using cDNA synthesized in Example 3 as a template. PCR was carried out 35 cycles of reaction at 95° C. for 30 seconds, at 58° C. for 30 seconds, and at 68° C. for 30 seconds as one cycle using this cDNA as a template, a primer (SEQ ID NOs:124 to 131) specific to the variable region of the human heavy chain, and a primer (SEQ ID NOs:132 to 135) specific to the Junction region, and using DNA polymerase (KOD-Plus, manufactured by Toyobo Co. Ltd). In addition, 5 types of primers specific to the Junction region were used together. Moreover, the restriction site of SfiI was inserted into the 5′-terminal of SEQ ID NOs:124 to 131, respectively, and the restriction site of AscI and the linker sequence were inserted to the 5′-terminal of SEQ ID NOs:132 to 135, respectively.

[0231] These VH gene fragments amplified by PCR were inserted into the vector prepared using pCANTAB5E/281 in the same manner as Example 3 to prepare an scFv antibody library. In this Example, approximately 5×10⁵ colonies were collected to prepare the library. The antibody phage library was prepared from this scFv antibody library.

### Example 22

[0232] Concentration of Phage Displaying svFv Antibody which recognizes Human-CD28

[0233] The concentrating of the antibody phage library prepared in Example 21 was prepared in the same manner as Example 5.

### Example 23

[0234] Selection of Antibody Display Phage which Recognizes Human-CD28 and Preparation of Anti-CD28 Antibody (281VL4)

[0235] The selection of the antibody display phage was carried out in the same manner as Example 6.

[0236] The scFv antibody which was found to bind to the antigen by ELISA was named 281VL4 scFv. In order to substitute the obtained scFv antibody with a normal type antibody, the cloning of the antibody gene was carried out and then the expression vector was prepared.

[0237] A heavy chain gene fragment was amplified by carrying out 30 cycles of reaction at 95° C. for 30 seconds, at 58° C. for 30 seconds, and at 68° C. for 30 seconds as one cycle using pCANTAB/281VL4 as a template and 5′-CTGCTGGTGGCGGCTCCCAGATGGGTCCTGTCCGAGGTCCAGCTGGTG-3′ (SEQ ID NO:136) and 5′-TGAGGAGACGGTGACCA-3′ (SEQ ID NO:137) as primers and using DNA polymerase (KOD-Plus, manufactured by Toyobo Co. Ltd). Then, in order to add the SalI sequence, the Kozac sequence, and the sequence encoding the signal to the 5′-terminal thereof and add the NheI sequence to the 3′-terminal thereof, the PCR was carried out using this gene fragment as a template. PCR was carried out 35 cycles of reaction at 95° C. for 30 seconds, at 58° C. for 30 seconds, and at 68° C. for 30 seconds as one cycle using the respective heavy chain gene fragments as a template and 5′-GGGGTCGACACCATGAAGCACCTGTGGTTCTTCCTCCTGCTGGTGGCGG-3′ (SEQ ID NO:138) and 5′-GGGGCTAGCTGAGGAGACGGTGACCA-3′ (SEQ ID NO:139) as primers and using DNA polymerase (KOD-Plus, manufactured by Toyobo Co. Ltd). Since the light chain of the 281VL4 scFv has the same amino acid sequence as that of the 281, the 281 expression vector (using N5KG4PE disclosed in WO2002/088186) was digested with SalI and NheI to cut out the heavy chain variable region. The heavy chain gene fragment of the 281VL4 scFv which was obtained by digesting with SalI and NheI, was inserted. The antibody comprising the light chain of the 281 (SEQ ID NO:118 and 119) and the heavy chain of the 281VL4 scFv was named 281VL4.

[0238] Each of the 281VL4 heavy chain nucleic acid sequence (SEQ ID NO:140) and the 281VL4 heavy chain amino acid sequence (SEQ ID NO:141) is shown in the Sequence Listing.

[0239] The translation initiation site of the 281VL4 antibody heavy chain nucleic acid is ATG codon starting from adenine (A) at position 1 and the termination codon is TGA starting from thymine (T) at position 1417 from 5′-terminal of SEQ ID NO:140. The boundary between the antibody variable region and the constant region is placed between adenine (A) at position 435 and guanine (G) at position 436 from 5′-terminal. In the amino acid sequence, the heavy chain variable region is from the N-terminal to the serine (S) residue at position 145 of SEQ ID NO:141, and the constant region is after alanine (A) at position 146. It is considered that the heavy chain signal sequence is from the N-terminal to serine (S) at position 19 of SEQ ID NO:141 and that the N-terminal of the mature protein is glutamic acid (E) at position 20.

### Example 24

[0240] Preparation of Expression Vectors of Multivalent Antibody (281VL4-CH1-281, 281VL4-CH1(118-131)-281, 281VL4-CH1(118-130)-281) comprising Antigen Recognition Site for CD28 (281VL4 Origin) at N-terminal Side, Antigen Recognition Site for CD40 (281 Origin) at C-terminal Side and Linker in Table 6

[0241] In order to prepare a multivalent antibody comprising the recognition site for CD28 and the recognition site for CD40 in order from the N-terminal side of the heavy chain, the heavy chain variable region of anti-CD28 antibody 281VL4 was linked in tandem to the heavy chain variable region of anti-CD40 antibody 281 from the N-terminal side via a linker shown in Table 6. Since the same light chain as that of 281 is used for the anti-CD28 antibody, the expression vector comprises one type of light chain sequence. These antibodies were named 281VL4-CH1-281, 281VL4-CH1(118-131)-281, and 281VL4-CH1(118-130)-281, respectively.

TABLE 6
Linker Structures of Multivalent Antibody
Linker

| | Amino Acid | |
|---|---|---|
| Name | Sequence | Base Sequence |
| CH1 | ASTKGPSVFPLAPC | GCTAGCACCAAGGGGCCATCCGT |
| | SRSTSESTAALGCL | CTTCCCCCTGGCGCCCTGCTCCA |
| | VKDYFPEPVTVSWN | GGAGCACCTCCGAGAGCACAGCC |
| | SGALTSGVHTFPAV | GCCCTGGGCTGCCTGGTCAAGGA |
| | LQSSGLYSLSSVVT | CTACTTCCCCGAACCGGTGACGG |
| | VPSSSLGTKTYTCN | TGTCGTGGAACTCAGGCGCCCTG |
| | VDHKPSNTKVDKRV | ACCAGCGGCGTGCACACCTTCCC |
| | GS | GGCTGTCCTACAGTCCTCAGGAC |
| | | TCTACTCCCTCAGCAGCGTGGTG |
| | | ACCGTGCCCTCCAGCAGCTTGGG |
| | | CACGAAGACCTACACCTGCAACG |
| | | TAGATCACAAGCCCAGCAACACC |
| | | CAGGTGGACAAGAGAGTTGGATC |
| | | C |
| CH1(118-131) | ASTKGPSVFPLAPC | GCTAGCACCAAGGGGCCATCCGT |
| | | CTTCCCCCTGGCGCCCTGC |
| CH1(118-130) | ASTKGPSVFPLAP | GCTAGCACCAAGGGGCCATCCGT |
| | | CTTCCCCCTGGCGCCC |

[0242] The 281VL4-CH1-281 comprises the sequence comprising the CH1 sequence (positions 118 to 215 of the EU index of Kabat) of IgG4 and the BamHI sequence (GGATCC) added to its 3′-terminal were inserted as a linker between the heavy chains (3′-terminal of 281VL4 heavy chain, 5′-terminal of 281 heavy chain).

[0243] The gene sequence encoding the heavy chain of 281VL4-CH1-281 was prepared by the following steps.

[0244] The linker gene fragment with the NheI sequence added to the 5′-terminal was amplified by carrying out 30 cycles of reaction at 95° C. for 30 seconds, at 55° C. for 30 seconds, and at 68° C. for 30 seconds as one cycle using the 281 heavy chain sequence as a template and 5′-GGGGCTAGCACCAAGGGGCCA-3′ (SEQ ID NO:144) and 5′-GGATCCAACTCTCTTGTCCACCTT-3′ (SEQ ID NO:145) as primers and using DNA polymerase (KOD-Plus, manufactured by Toyobo Co. Ltd). A 281 heavy chain gene fragment with the linker gene (15 bases from the 3′-terminal side) added to the 5′-terminal and with the NheI sequence added to the 3′-terminal was amplified by carrying out 30 cycles of reaction at 95° C. for 30 seconds, at 55° C. for 30 seconds, and at 68° C. for 30 seconds using the 281 heavy chain sequence as a template and 5′-AAGAGAGTTGGATCCCAGGTGCAGCTGCAG-3′ (SEQ ID NO:146) and 5′-GGGGCTAGCTGAGGAGACGGTGACCA-3′ (SEQ ID NO:147) as primers and using DNA polymerase (KOD-Plus, manufactured by Toyobo Co. Ltd). The thus obtained two gene fragments were linked with Over Extension PCR, and thereby the linker-281 heavy chain gene fragment was prepared. This gene fragment was digested with NheI and then inserted into 281VL4 expression vector which had been dephosphorylated with Alkaline Phosphatase (BAP, manufactured by Takara Bio Inc) after digesting with NheI. Each of 281VL4-CH1-281 heavy chain nucleic acid sequence (SEQ ID NO:148) and 281VL4-CH1-281 heavy chain amino acid sequence (SEQ ID NO:149) is shown in the Sequence Listing.

[0245] In order to prepare a multivalent antibody comprising the recognition site for CD28 and the recognition site for CD40 in a row in order from the N-terminal side of the heavy chain, the heavy chain variable region of the anti-CD28 antibody 281VL4 was linked in tandem to the heavy chain variable region of anti-CD40 antibody 281 via the linker (SEQ ID NO:151). Since the same light chain as that of 281 is used for the anti-CD28 antibody, the expression vector comprises one type of light chain sequence. This multivalent antibody was named 281VL4-CH1(118-131)-281.

[0246] In 281VL4-CH1(118-131)-281, CH1 sequence of IgG4 (positions 118 to 131 of the EU index of Kabat) was inserted as a linker between the heavy chains (3′-terminal of 281VL4 heavy chain, 5′-terminal of 281 heavy chain).

[0247] The gene sequence encoding the heavy chain of 281VL4-CH1(118-131)-281 was prepared by the following steps.

[0248] Thirty cycles of reaction at 95° C. for 30 seconds, at 55° C. for 30 seconds, and at 68° C. for 30 seconds as one cycle were carried out using the 281 heavy chain sequence as the template and 5′-GTCTTCCCCCTGGCGCCCTGCCAGGTGCAGCTGCAGGAGTC-3′ (SEQ ID NO:150) and 5′-GGGGCTAGCTGAGGAGACGGTGACCA-3 (SEQ ID NO:147) as primers and using DNA polymerase (KOD-Plus, manufactured by Toyobo Co. Ltd). A 281 heavy chain gene fragment with the linker gene (the 5′-terminal of the linker sequence is the NheI sequence) added to the 5′-terminal and with the NheI sequence added to the 3′-terminal was amplified by carrying out by 35 cycles of reaction at 95° C. for 30 seconds, at 55° C. for 30 seconds, and at 68° C. for 30 seconds as one cycle using this PCR product as a template and 5′-GGGGCTAGCACCAAGGGGCCATCCGTCTTCCCCCTGGCGCCC-3′ (SEQ ID NO:151) and 5′-GGGGCTAGCTGAGGAGACGGTGACCA-3′ (SEQ ID NO: 147) as a primer and using DNA polymerase (KOD-Plus, manufactured by Toyobo Co. Ltd). The thus obtained gene fragment was digested with NheI and then inserted into the 281VL4 expression vector which had been dephosphorylated with Alkaline Phosphatase (BAP, manufactured by Takara Bio Inc) after digesting with NheI. Each of 281VL4-CH1(118-131)-281 heavy chain nucleic acid sequence (SEQ ID NO:152) and 281VL4-CH1(118-131)-281 heavy chain amino acid sequence (SEQ ID NO:153) is shown in the Sequence Listing.

[0249] In 281VL4-CH1(118-130)-281, CH1 sequence (positions 118 to 130 of the EU index of Kabat) of IgG4 was inserted as a linker between the heavy chains (3′-terminal of 281VL4 heavy chain, 5′-terminal of 281 heavy chain).

[0250] The gene sequence encoding the heavy chain of 281VL4-CH1(118-130)-281 was prepared by the following steps.

[0251] Thirty cycles of reaction at 95° C. for 30 seconds, at 55° C. for 30 seconds, and at 68° C. for 30 seconds as one cycle were carried out using the 281 heavy chain sequence as a template and 5′-GTCTTCCCCCTGGCGCCCCAGGTGCAGCTGCAGGAGTC-3′ (SEQ ID NO:154) and 5′-GGGGCTAGCTGAGGAGACGGTGACCA-3 (SEQ ID NO:147) as primers and using DNA polymerase (KOD-Plus, manufactured by Toyobo Co. Ltd). The 281 heavy chain gene fragment with the linker gene (the 5′-terminal of the linker sequence is the NheI sequence) added to the 5′-terminal and with the NheI sequence added to the 3′-terminal was amplified by carrying out 35 cycles of reaction at 95° C. for 30 seconds, at 55° C. for 30 seconds, and at 68° C. for 30 seconds as one cycle using thus obtained PCR product as a template and 5′-GGGGCTAGCACCAAGGGGCCATCCGTCTTCCCCCTGGCGCCC-3′ (SEQ ID NO:151) and 5′-GGGGCTAGCTGAGGAGACGGTGACCA-3′ (SEQ ID NO:147) as primers and using DNA polymerase (KOD-Plus, manufactured by Toyobo Co. Ltd). The thus obtained gene fragment was digested with NheI and then inserted into the 281VL4 expression vector which had been dephosphorylated with Alkaline Phosphatase (BAP, manufactured by Takara Bio Inc) after digesting with NheI. Each of the nucleic acid sequence of 281VL4-CH1(118-130)-281 heavy chain (SEQ ID NO:155) and the amino acid sequence of 281VL4-CH1(118-130)-281 heavy chain (SEQ ID NO:156) is shown in the Sequence Listing.

### Example 25

[0252] Expression and Purification of Multivalent Antibody

[0253] The produced expression vector gene was prepared using QIAGEN Plasmid Maxi Kit (manufactured by Qiagen) and then introduced into nonadherent 293 cells using FreeStyle™ 293 Expression System (Invitrogen by Life Technologies Corporation), and thereby the culture supernatant containing each antibodies was obtained by transient expression. The purified antibody was obtained from the culture supernatant in accordance with the procedure of Example 16. In regard to the density of a purified antibody, the absorbance at 280 nm was measured, and the density of 1 mg/mL antibody was assumed to be 1.40 optimal density for the calculation.

### Example 26

[0254] Measurement of Antibody Productivity

[0255] The antibody content of each culture supernatant was measured to know the productivity of the antibody. The measurement of the antibody content was carried out in the same manner as Example 17. The result is shown in Table 7.

TABLE 7
Productivity of Respective Antibodies

| | Antibody Density | | |
|---|---|---|---|
| | in Culture | | |
| Name of Multivalent | Supernatant | | Amino Acid Number |
| Antibody | μg/mL | nM | of Linker |
| 281 | 11.4 | 78.6 | — |
| 281VL4 | 14.5 | 99.5 | — |
| 281VL4-CH1-281 | 24.3 | 101.5 | 100 |
| 281VL4-CH1(118-131)-281 | 24.8 | 111.9 | 14 |
| 281VL4-CH1(118-130)-281 | 12.9 | 58.3 | 13 |

### Example 27

[0256] Evaluation of Antibody Stability

[0257] The aggregate content rate of the antibody solution was measured in the same manner as Example 18. The result is shown in Table 8.

TABLE 8
Aggregate Containing Amount of Respective Purified Antibody

| Name of | Aggregate | Amino Acid |
|---|---|---|
| Multivalent Antibody | Content (%) | Number of Linker |
| 281VL4-CH1-281 | 1.5 | 100 |
| 281VL4-CH1(118-131)-281 | 1.4 | 14 |
| 281VL4-CH1(118-130)-281 | 9.2 | 13 |

### Example 28

[0258] Evaluation of Antigen Binding Property of Antibody

[0259] The binding of the produced antibody comprising two (CD40 and CD28) recognition sites for each antigen was measured in the same manner as Example 19. As a result, it was found that all of 281VL4-CH1-281, 281VL4-CH1(118-131)-281 and 281VL4-CH1(118-130)-281 bound to human-CD40-Fc fusion protein and human-CD28-Fc fusion protein.

### Example 29

[0260] Preparation of Expression Vector of Multivalent Antibody comprising Antigen Recognition Site for CD28 (281VL4 Origin) at N-terminal Side, Antigen Recognition Site for CD40 (281 Origin) at C-terminal Side and Linker in Table 9

[0261] In order to produce the multivalent antibody comprising the recognition site for CD28 and the recognition site for CD40 in a row in order from the heavy chain N-terminal side, the heavy chain variable region of anti-CD28 antibody 281VL4 was linked in tandem to the heavy chain variable region of anti-CD40 antibody 281 from the N-terminal side via the linker shown in Table 9. Since the same light chain as that of 281 is used for the anti-CD28 antibody, the expression vector comprises one type of light chain sequence. This multivalent antibody was named 281VL4-CH1(118-131/C131S)-281.

TABLE 9
Linker Structures of Multivalent Antibody
Linker

| | Amino Acid | |
|---|---|---|
| Name | Sequence | Base Sequence |
| CH1 (118-131) | ASTKGPSVFPLAPC | GCTAGCACCAAGGGGCCATCC |
| | | GTCTTCCCCCTGGCGCCCTGC |
| CH1 | ASTKGPSVFPLAPS | GCATCCCCGACCAGCCCCAAG |
| (118-131/C131S) | | GTCTTCCCGCTGAGCCTCTCC |

[0262] In 281VL4-CH1(118-131/C131S)-281, CH1 sequence of IgG1 (positions 118 to 131 of the EU index of Kabat) was inserted as a linker between the heavy chains (3′-terminal of 281VL4 heavy chain, 5′-terminal of 281 heavy chain).

[0263] The gene sequences encoding the heavy chains of these antibodies were prepared based on the procedure of the genetic method used in Example 24. Each of 281VL4-CH1(118-131/C131S)-281 heavy chain nucleic acid sequence (SEQ ID NO:157) and 281VL4-CH1(118-131/C131S)281 heavy chain amino acid sequence (SEQ ID NO:158) is shown in the Sequence Listing.

### Example 30

[0264] Preparation of Expression Vector of Multivalent Antibody comprising Antigen Recognition Site for CD28 (281VL4 Origin) at N-terminal Side, Antigen Recognition Site for CD40 (281 Origin) at C-terminal Side and Linker in Table 10

[0265] In order to produce the multivalent antibody comprising the recognition site for CD28 and the recognition site for CD40 in a row in order from the heavy chain N-terminal side, the heavy chain variable region of the anti-CD28 antibody 281VL4 was linked in tandem to the heavy chain variable region of anti-CD40 antibody 281 from the N-terminal side via a linker shown in Table 10. Since the same light chain as that of the 281 is used for the anti-CD28 antibody, the expression vector comprises one type of light chain sequence. These multivalent antibodies were named 281VL4-CH1(118-119+C)-281, 281VL4-CH1(118-120+C)-281, 281VL4-CH1(118-121+C)-281, 281VL4-CH1(118-122+C)-281, 281VL4-CH1(118-123+C)-281, 281VL4-CH1(118-124+C)-281, 281VL4-CH1(118-125+C)-281, 281VL4-CH1(118-126+C)-281, 281VL4-CH1(118-127+C)-281, 281VL4-CH1(118-128+C)-281, and 281VL4-CH1(118-129+C)-281, respectively.

TABLE 10
Linker Structures of Multivalent Antibody
Linker

| | Amino Acid | |
|---|---|---|
| Name | Sequence | Base Sequence |
| GCH1(118-131) | ASTKGPSVFPLAP | CTAGCACCAAGGGGCCATCCG |
| | C | TCTTCCCCCTGGCGCCCTGC |
| CH1(118-119 + C) | ASC | GCTAGCTGC |
| CH1(118-120 + C) | ASTC | GCTAGCACCTGC |
| CH1(118-121 + C) | ASTKC | GCTAGCACCAAGTGC |
| CH1(118-122 + C) | ASTKGC | GCTAGCACCAAGGGGTGC |
| CH1(118-123 + C) | ASTKGPC | GCTAGCACCAAGGGGCCATGC |
| CH1(118-124 + C) | ASTKGPSC | GCTAGCACCAAGGGGCCATCC |
| | | TGC |
| CH1(118-125 + C) | ASTKGPSVC | GCTAGCACCAAGGGGCCATCC |
| | | GTCTGC |
| CH1(118-126 + C) | ASTKGPSVFC | GCTAGCACCAAGGGGCCATCC |
| | | GTCTTCTGC |
| CH1(118-127 + C) | ASTKGPSVFPC | GCTAGCACCAAGGGGCCATCC |
| | | GTCTTCCCTGC |
| CH1(118-128 + C) | ASTKGPSVFPLC | GCTAGCACCAAGGGGCCATCC |
| | | GTCTTCCCCCTGTGC |
| CH1(118-129 + C) | ASTKGPSVFPLAC | GCTAGCACCAAGGGGCCATCC |
| | | GTCTTCCCCCTGGCGTGC |

[0266] In 281VL4-CH1(118-119+C)-281, 281VL4-CH1(118-120+C)-281, 281VL4-CH1(118-121+C)-281, 281VL4-CH1(118-122+C)-281, 281VL4-CH1(118-123+C)-281, 281VL4-CH1(118-124+C)-281, 281VL4-CH1(118-125+C)-281, 281VL4-CH1(118-126+C)-281, 281VL4-CH1(118-127+C)-281, 281VL4-CH1(118-128+C)-281 and 281VL4-CH1(118-129+C)-281, the sequence comprising CH1 sequence (at positions 118 and 119 to 129 of the EU index of Kabat) of IgG4 and TGC (the nucleic acid sequence encoding cysteine when converted to amino acid) at its 3′-terminal was inserted as a linker between the heavy chains (3′-terminal of the 281VL4 heavy chain, 5′-terminal of the 281 heavy chain).

[0267] The gene sequences encoding the heavy chains of these antibodies were prepared based on the procedure of the genetic method used in Example 24. Each of the heavy chain nucleic acid sequences and the heavy chain amino acid sequences (SEQ ID NOs:159 to 180) is shown in the Sequence Listing.

### Example 31

[0268] Preparation of Expression Vector of Multivalent Antibody comprising Antigen Recognition Site for CD28 (281VL4 Origin) at N-terminal Side, Antigen Recognition Site for CD40 (281 Origin) at C-terminal Side and Linker in Table 11

[0269] In order to prepare a multivalent antibody comprising the recognition site for CD28 and the recognition site for CD40 in a row in order from the N-terminal side of the heavy chain, the heavy chain variable region of anti-CD28 antibody 281VL4 was linked in tandem to the heavy chain variable region of anti-CD40 antibody 281 from the N-terminal side via a linker shown in Table 11. Since the same light chain as that of the 281 is used for the anti-CD28 antibody, the expression vector comprises one type of light chain sequence. These multivalent antibodies were named 281VL4-CH1(118-131/A118S)-281, 281VL4-CH1(118-131/S119A)-281, 281VL4-CH1(118-131/T120A)-281, 281VL4-CH1(118-131/K121A)-281, 281VL4-CH1(118-131/G122A)-281, 281VL4-CH1(118-131/P123A)-281, 281VL4-CH1(118-131/S124A)-281, 281VL4-CH1(118-131N125A)-281, 281VL4-CH1(118-131/F126A)-281, 281VL4-CH1(118-131/P127A)-281, 281VL4-CH1(118-131/L128A)-281, 281VL4-CH1(118-131/A129S)-281, and 281VL4-CH1(118-131/P130A)-281, respectively.

TABLE 11
Linker Structures of Multivalent Antibody
Linker

| | Amino Acid | |
|---|---|---|
| Name | Sequence | Base Sequence |
| CH1(118-131) | ASTKGPSVFOLAPC | GCTAGCACCAAGGGGCCATCC |
| | | GTCTTCCCCCTGGCGCCCTGC |
| CH1 | SSTKGPSVFPLAPC | TCTAGCACCAAGGGGCCATCC |
| (118-131/A118S) | | GTCTTCCCCCTGGCGCCCTGC |
| CH1 | AATKGPSVFPLAPC | GCTGCCACCAAGGGGCCATCC |
| (118-131/S119A) | | GTCTTCCCCCTGGCGCCCTGC |
| CH1 | ASAKGPSVFPLAPC | GCTAGCGCCAAGGGGCCATCC |
| (118-131/T120A) | | GTCTTCCCCCTGGCGCCCTGC |
| CH1 | ASTAGPSVFPLAPC | GCTAGCACCGCGGGGCCATCC |
| (118-131/K121A) | | GTCTTCCCCCTGGCGCCCTGC |
| CH1 | ASTKAPSVFPLAPC | GCTAGCACCAAGGCGCCATCC |
| (118-131/G122A) | | GTCTTCCCCCTGGCGCCCTGC |
| CH1 | ASTKGASVFPLAPC | GCTAGCACCAAGGGGGCATCC |
| (118-131/P123A) | | GTCTTCCCCCTGGCGCCCTGC |
| CH1 | ASTKGPAVFPLAPC | GCTAGCACCAAGGGGCCAGCC |
| (118-131/S124A) | | GTCTTCCCCCTGGCGCCCTGC |
| CH1 | ASTKGPSAFPLAPC | GCTAGCACCAAGGGGCCATCC |
| (118-131/V125A) | | GCCTTCCCCCTGGCGCCCTGC |
| CH1 | ASTKGPSVAPLAPC | GCTAGCACCAAGGGGCCATCC |
| (118-131/F126A) | | GTCGCCCCCCTGGCGCCCTGC |
| CH1 | ASTKGPSVFALAPC | GCTAGCACCAAGGGGCCATCC |
| (118-131/P127A) | | GTCTTCGCCCTGGCGCCCTGC |
| CH1 | ASTKGPSVFPAAPC | GCTAGCACCAAGGGGCCATCC |
| (118-131/L128A) | | GTCTTCCCCGCGGCGCCCTGC |
| CH1 | ASTKGPSVFPLSPC | GCTAGCACCAAGGGGCCATCC |
| (118-131/A129S) | | GTCTTCCCCCTGTCGCCCTGC |
| CH1 | ASTKGPSVFPLAAC | GCTAGCACCAAGGGGCCATCC |
| (118-131/P130A) | | GTCTTCCCCCTGGCGGCCTGC |

[0270] In 281VL4-CH1(118-131/A118S)-281, 281VL4-CH1(118-131/S119A)-281, 281VL4-CH1(118-131/T120A)-281, 281VL4-CH1(118-131/K121A)-281, 281VL4-CH1(118-131/G122A)-281, 281VL4-CH1(118-131/P123A)-281, 281VL4-CH1(118-131/S124A)-281, 281VL4-CH1(118-131N125A)-281, 281VL4-C29H1(118-131/F126A)-281, 281VL4-CH1(118-131/P127A)-281, 281VL4-CH1(118-131/L128A)-281, 281VL4-CH1(118-131/A129S)-281, and 281VL4-CH1(118-131/P130A)-281, a sequence in which the CH1 (positions 118 to 131 of the EU index of Kabat) of IgG4 was mutated was inserted as a linker between the heavy chains (3′-terminal of the 281VL4 heavy chain, 5′-terminal of the 281 heavy chain). The mutation in each linker is one amino acid. Namely, the amino acid in the CH1 sequence of IgG4 was substituted with alanine. In addition, when alanine originally exists at the position to be mutated, alanine is substituted with cysteine.

[0271] The gene sequences encoding the heavy chains of these antibodies were produced based on the procedure of the genetic method used in Example 24. Each of the heavy chain nucleic acid sequences and heavy chain amino acid sequences (SEQ ID NOs:181 to 206) is shown in the Sequence Listing.

### Example 32

[0272] Preparation of Expression Vector of Multivalent Antibody comprising Antigen Recognition Site for CD28 (281VL4 Origin) at N-terminal Side, Antigen Recognition Site for CD40 (281 Origin) at C-terminal Side and Linker in Table 12

[0273] In order to produce the multivalent antibody comprising the recognition site for CD28 and the recognition site for CD40 in a row in order from the heavy chain N-terminal side, the heavy chain variable region of anti-CD28 antibody 281VL4 was linked in tandem from the N-terminal side to the heavy chain variable region of the anti-CD40 antibody 281 via the linker shown in Table 12. Since the same light chain as that of the 281 is used for the anti-CD28 antibody, the expression vector comprises one type of light chain sequence. These multivalent antibodies were named 281VL4-CH1(IGHA)-281, 281VL4-CH1(IGHD(14))-281, 281VL4-CH1(IGHD(15))-281, 281VL4-CH1(IGHE)-281, 281VL4-CH1(IGHGP)-281, and 281VL4-CH1(IGHM)-281, respectively.

TABLE 12
Linker Structures of Multivalent Antibody
Linker

| | Amino Acid | |
|---|---|---|
| Name | Sequence | Base Sequence |
| C111 (118-131) | ASTKGPSVFPLAPC | GCTAGCACCAAGGGGCCATCC |
| | | GTCTTCCCCCTGGCGCCCTGC |
| CH1 (IGHA) | ASPTSPKVFPLSLC | GCATCCCCGACCAGCCCCAAG |
| | | GTCTTCCCGCTGAGCCTCTGC |
| CH1 (IGHD(14)) | APTKAPDVFPIISC | GCACCCACCAAGGCTCCGGAT |
| | | GTGTTCCCCATCATATCATGC |
| CH1 (IGHD(15)) | APTKAPDVFPIISG | GCACCCACCAAGGCTCCGGAT |
| | C | GTGTTCCCCATCATATCAGGG |
| | | TGC |
| CH1 (IGHE) | ASTQSPSVFPLTRC | GCCTCCACACAGAGCCCATCC |
| | | GTCTTCCCCTTGACCCGCTGC |
| CH1 (IGHGP) | ASTKGPSVFPLVPC | GCCTCCACCAAGGGCCCATCG |
| | | GTCTTCCCCCTGGTGCCCTGC |
| CH1 (IGHM) | GSASAPTLFPLVSC | GGGAGTGCATCCGCCCCAACC |
| | | CTTTTCCCCCTCGTCTCCTGT |

[0274] In 281VL4-CH1(IGHA)-281, 281VL4-CH1(IGHD(14))-281, 281VL4-CH1(IGHE)-281, 281VL4-CH1(IGHGP)-281, and 281VL4-CH1(IGHM)-281, the CH1 sequence (positions 118 to 131 of the EU index of Kabat) of each subclasses was inserted as a linker between the heavy chains (3′-terminal of the 281VL4 heavy chain, 5′-terminal of the 281 heavy chain). Since the subclass IGHD in which amino acid at position 131 was not cysteine, the amino acid at position 131 was substituted by replacing glycine with cysteine, and for IGHGP, the amino acid at position 131 was substituted by replacing serine with cysteine. In addition, in 281VL4-CH1(IGHD(15))-281, the CH1 sequence (positions 118 to 132) of IGHD was inserted as a linker between the heavy chains.

[0275] The gene sequences encoding the heavy chains of these antibodies were produced based on the procedure of the genetic method used in Example 24. Each of the heavy chain nucleic acid sequences and heavy chain amino acid sequences (SEQ ID NOs:207 to 218) is shown in the Sequence Listing.

### Example 33

[0276] Preparation of Expression Vector of Multivalent Antibody comprising Antigen Recognition Site for CD28 (281VL4 Origin) at N-terminal Side, Antigen Recognition Site for CD40 (281 Origin) at C-terminal Side and Linker in Table 13

[0277] In order to produce the multivalent antibody comprising the recognition site for CD28 and the recognition site for CD40 in a row in order from the heavy chain N-terminal side, the heavy chain variable region of anti-CD28 antibody 281VL4 was linked in tandem to the heavy chain variable region of anti-CD40 antibody 281 from the N-terminal side via a linker shown in Table 13. Since the same light chain as that of 281 is used for the anti-CD28 antibody, the expression vector comprises one type of light chain sequence. These multivalent antibodies were named 281VL4-CH1(118-131/A118G)-281, 281VL4-CH1(118-131/S119T)-281, 281VL4-CH1(118-131/P123F)-281, 281VL4-CH1(118-131/V125L)-281, 281VL4-CH1(118-131/V125I)-281, 281VL4-CH1(118-131/F126L)-281, 281VL4-CH1(118-131/F126Y)-281, 281VL4-CH1(118-131/P127G)-281, 281VL4-CH1(118-131/L128V)-281, 281VL4-CH1(118-131/L1281)-281, 281VL4-CH1(118-131/A129I)-281, and 281VL4-CH1(118-131/P130F)-281, respectively.

TABLE 13
Linker Structures of Multivalent Antibody
Linker

| | Amino Acid | |
|---|---|---|
| Name | Sequence | Base Sequence |
| CH1 (118-131) | ASTKGPSVFPLAPC | GCTAGCACCAAGGGGCCATCC |
| | | GTCTTCCCCCTGGCGCCCTGC |
| CH1 | GSTKGPSVFPLAPC | GGCAGCACCAAGGGGCCATCC |
| (118-131/A118G) | | GTCTTCCCCCTGGCGCCCTGC |
| CH1 | ATTKGPSVFPLAPC | GCTACCACCAAGGGGCCATCC |
| (118-131/S119T) | | GTCTTCCCCCTGGCGCCCTGC |
| CH1 | ASTKGFSVFPLAPC | CCTAGCACCAAGGGGTTCTCC |
| (118-131/P123F) | | GTCTTCCCCCTGGCGCCCTGC |
| CH1 | ASTKGPSLFPLAPC | GCTAGCACCAAGGGGCCATCC |
| (118-131/V125L) | | CTGTTCCCCCTGGCGCCCTGC |
| CH1 | ASTKGPSIFPLAPC | GCTAGCACCAAGGGGCCATCC |
| (118-131/V125I) | | ATCTTCCCCCTGGCGCCCTGC |
| CH1 | ASTKGPSVLPLAPC | GCTAGCACCAAGGGGCCATCC |
| (118-131/F126L) | | GTCCTGCCCCTGGCGCCCTGC |
| CH1 | ASTKGPSVYPLAPC | GCTAGCACCAAGGGGCCATCC |
| (118-131/F126Y) | | GTCTACCCCCTGGCGCCCTGC |
| CH1 | ASTKGPSVFGLAPC | GCTAGCACCAAGGGGCCATCC |
| (118-131/P127G) | | GTCTTCGGCCTGGCGCCCTGC |
| CH1 | ASTKGPSVFPVAPC | GCTAGCACCAAGGGGCCATCC |
| (118-131/L128V) | | GTCTTCCCCGTGGCGCCCTGC |
| CH1 | ASTKGPSVFPIAPC | GCTAGCACCAAGGGGCCATCC |
| (118-131/L128I) | | GTCTTCCCCATCGCGCCCTCG |
| CH1 | ASTKGPSVFPLIPC | GCTAGCACCAAGGGGCCATCC |
| (118-131/A129I) | | GTCTTCCCCCTGATCCCCTGC |
| CH1 | ASTKGPSVFPLAFC | GCTAGCACCAAGGGGCCATCC |
| (118-131/P130F) | | GTCTTCCCCCTGGCGTTCTGC |

[0278] In 281VL4-CH1(118-131/A118G)-281, 281VL4-CH1(118-131/S119T)-281, 281VL4-CH1(118-131/P123F)-281, 281VL4-CH1(118-131N125L)-281, 281VL4-CH1(118-131/V125I)-281, 281VL4-CH1(118-131/F126L)-281, 281VL4-CH1(118-131/F126Y)-281, 281VL4-CH1(118-131/P127G)-281, 281VL4-CH1(118-131/L128V)-281, 281VL4-CH1(118-131/L1281)-281, 281VL4-CH1(118-131/A129I)-281, and 281VL4-CH1(118-131/P130F)-281, a sequence in which the CH1 (positions 118 to 131 of the EU index of Kabat) of IgG4 was mutated was inserted as a linker between the heavy chains (3′-terminal of the 281VL4 heavy chain, 5′-terminal of the 281 heavy chain). The mutation in each linker is one amino acid. The amino acid in the CH1 sequence of IgG4 was substituted with other amino acids at random.

[0279] The gene sequences encoding the heavy chains of these antibodies were prepared based on the procedure of the genetic method used in Example 24. Each of the heavy chain nucleic acid sequences and heavy chain amino acid sequences (SEQ ID NOs:219 to 242) is shown in the Sequence Listing.

### Example 34

[0280] Expression and Purification of Multivalent Antibody

[0281] Each expression vector gene prepared in Examples 29 to 33 was obtained using QIAGEN Plasmid Maxi Kit (manufactured by Qiagen) and then introduced into nonadherent 293 cells using FreeStyle™ 293 Expression System (Invitrogen by Life Technologies Corporation) to obtain culture supernatant containing each antibody by transient expression. The purified antibody was obtained from the culture supernatant in accordance with the procedure of Example 16. In regard to the density of the purified antibody, the absorbance at 280 nm was measured, and the density of the 1 mg/mL antibody was assumed to be 1.40 Optimal Density for the calculation.

### Example 35

[0282] Evaluation of Antibody Stability

[0283] The aggregate content rate of the antibody solution was measured in accordance with the procedure of Example 18. The result is shown in Table 14.

TABLE 14
Aggregate Content of Respective Purified Antibody

| | | |
|---|---|---|
| | Aggregate | Amino Acid |
| Name of Multivalent Antibody | Content (%) | Number of Linker |

1) Antibody Shown in Example 29

| | | |
|---|---|---|
| 281VL4-CH1(118-131/C131S)-281 | 6.1 | 14 |

2) Antibody Shown in Example 30

| | | |
|---|---|---|
| 281VL4-CH1(118-119 + C)-281 | 12.9 | 3 |
| 281VL4-CH1(118-120 + C)-281 | 13.3 | 4 |
| 281VL4-CH1(118-121 + C)-281 | 11.1 | 5 |
| 281VL4-CH1(118-122 + C)-281 | 13.0 | 6 |
| 281VL4-CH1(118-123 + C)-281 | 13.1 | 7 |
| 281VL4-CH1(118-124 + C)-281 | 11.2 | 8 |
| 281VL4-CH1(118-125 + C)-281 | 9.7 | 9 |
| 281VL4-CH1(118-126 + C)-281 | 12.2 | 10 |
| 281VL4-CH1(118-127 + C)-281 | 10.5 | 11 |
| 281VL4-CH1(118-128 + C)-281 | 9.7 | 12 |
| 281VL4-CH1(118-129 + C)-281 | 9.2 | 13 |

3) Antibody Shown in Example 31

| | Aggregate | Amino Acid |
|---|---|---|
| Multivalent Antibody Name | Content (%) | Number of Linker |
| 281VL4-CH1(118-131/A118S)-281 | 3.7 | 14 |
| 281VL4-CH1(118-131/S119A)-281 | 3.6 | 14 |
| 281VL4-CH1(118-131/T120A)-281 | 4.9 | 14 |
| 281VL4-CH1(118-131/K121A)-281 | 3.3 | 14 |
| 281VL4-CH1(118-131/G122A)-281 | 4.7 | 14 |
| 281VL4-CH1(118-131/P123A)-281 | 2.9 | 14 |
| 281VL4-CH1(118-131/S124A)-281 | 4.7 | 14 |
| 281VL4-CH1(118-131/V125A)-281 | 3.4 | 14 |
| 281VL4-CH1(118-131/F126A)-281 | 4.9 | 14 |
| 281VL4-CH1(118-131/P127A)-281 | 5.3 | 14 |
| 281VL4-CH1(118-131/L128A)-281 | 5.2 | 14 |
| 281VL4-CH1(118-131/A129S)-281 | 4.3 | 14 |
| 281VL4-CH1(118-131/P130A)-281 | 4.3 | 14 |
| | Aggregate | Amino Acid |
| Name of Multivalent Antibody | Content (%) | Number of Linker |

4) Antibody Shown in Example 32

| | | |
|---|---|---|
| 281VL4-CH1(IGHA)-281 | 2.6 | 14 |
| 281VL4-CH1(IGHD(14))-281 | 3.9 | 14 |
| 281VL4-CH1(IGHD(15))-281 | 3.9 | 15 |
| 281VL4-CH1(IGHE)-281 | 3.6 | 14 |
| 281VL4-CH1(IGHGP)-281 | 3.3 | 14 |
| 281VL4-CH1(IGHM)-281 | 2.4 | 14 |

5) Antibody Shown in Example 33

| | | |
|---|---|---|
| 281VL4-CH1(118-131/A118G)-281 | 3.2 | 14 |
| 281VL4-CH1(118-131/S119T)-281 | 2.7 | 14 |
| 281VL4-CH1(118-131/P123F)-281 | 3.5 | 14 |
| 281VL4-CH1(118-131/V125L)-281 | 2.6 | 14 |
| 281VL4-CH1(118-131/V125I)-281 | 2.1 | 14 |
| 281VL4-CH1(118-131/F126L)-281 | 3.6 | 14 |
| 281VL4-CH1(118-131/F126Y)-281 | 1.7 | 14 |
| 281VL4-CH1(118-131/P127G)-281 | 2.7 | 14 |
| 281VL4-CH1(118-131/L128V)-281 | 2.3 | 14 |
| 281VL4-CH1(118-131/L128I)-281 | 2.7 | 14 |
| 281VL4-CH1(118-131/A129I)-281 | 1.6 | 14 |
| 281VL4-CH1(118-131/P130F)-281 | 4.2 | 14 |

### Example 36

[0284] Structure of Multivalent Antibody comprising Antigen Recognition Site for CD28 (281VL4 Origin) at N-terminal Side, Antigen Recognition Site for CD40 (281 Origin) at C-terminal Side and Sequence in CH1 Region of Each Subclass of Human Ig as Linker

[0285] In order to prepare a multivalent antibody comprising the recognition site for CD28, the recognition site for CD40 in a row in order from the N-terminal side of the heavy chain, the heavy chain variable region of anti-CD28 antibody 281VL4 was linked in tandem to the heavy chain variable region of the anti-CD40 antibody 281 from the N-terminal side via a linker shown in Table 1. As a linker of the multivalent antibody in each Example, the sequence in the CH1 region of each subclass of human Ig and GS (GGATCC) of BamHI sequence added to its 3′-terminal were inserted. These multivalent antibodies were named 281VL4-A1 (118-143)GS-281, 281VL4-A2(118-143)GS-281, 281VL4-E(118-143)GS-281, 281VL4-G1(118-143)GS-281, 281VL4-G2(118-143)GS-281, 281VL4-G3(118-143)GS-281, 281VL4-HGP(118-143)GS-281, 281VL4-D(118-143)GS-281, and 281VL4-M(118-143)GS-281, respectively. FIG. 15 shows the structures of the produced multivalent antibodies.

TABLE 15
Structures of Multivalent Antibody

| | Antibody | Antibody | | | |
|---|---|---|---|---|---|
| | Name | Name | | | Linker |
| Mulitvalent | Used at | Used at | | | Amino |
| Antibody | N-terminal | C-terminal | Base Sequence of Linker (SEQ ID NO:) | EU index | Acid |
| Name | Side | Side | Amino Acid Sequence of Linker (SEQ ID NO:) | of Kabat | Number |
| 281VL4-A1 | 281VL4 | 281 | (SEQ ID NO: 243) | 118 to 143 | 27 |
| (118-143) | | | GCTAGCCCGACCAGCCCCAAGGTCTTCC | | |
| GS-281 | | | CGCTGAGCCTCTGCAGCACCCAGCCAGA | | |
| | | | TGGGAACGTGGTCATCGCCGGATCC | | |
| | | | (SEQ ID NO: 244) | | |
| | | | ASPTSPKVFPLSLCSTQPDGNVVIAGS | | |
| 281VL4-A2 | 281VL4 | 281 | (SEQ ID NO: 245) | 118 to 143 | 27 |
| (118-143) | | | GCTAGCCCGACCAGCCCCAAGGTCTTCC | | |
| GS-281 | | | CGCTGAGCCTCTGCAGCACCCCCCAAGA | | |
| | | | TGGGAACGTGGTCGTCGCAGGATCC | | |
| | | | (SEQ ID NO: 246) | | |
| | | | ASPTSPKVFPLSLCSTPQDGNVVVAGS | | |
| 281VL4-D | 281VL4 | 281 | (SEQ ID NO: 247) | 118 to 143 | 29 |
| (118-143) | | | GCACCCACCAAGGCTCCGGATGTGTTCC | | |
| GS-281 | | | CCATCATATCAGGGTGCAGACACCCAAA | | |
| | | | GGATAACAGCCCTGTGGTCCTGGCAGGA | | |
| | | | TCC | | |
| | | | (SEQ ID NO: 248) | | |
| | | | APTKAPDVFPIISGCRHPKDNSPVVLAGS | | |
| 281VL4-E | 281VL4 | 281 | (SEQ ID NO: 249) | 118 to 143 | 30 |
| (118-143) | | | GCTAGCACACAGAGCCCATCCGTCTTCC | | |
| GS-281 | | | CCTTGACCCGCTGCTGCAAAAACATTCC | | |
| | | | CTCCAATGCCACCTCCGTGACTCTGGGC | | |
| | | | GGATCC | | |
| | | | (SEQ ID NO: 250) | | |
| | | | ASTQSPSVFPLTRCCKNIPSNATSVTLGGS | | |
| 281VL4-G1 | 281VL4 | 281 | (SEQ ID NO: 251) | 118 to 143 | 28 |
| (118-143) | | | GCTAGCACCAAGGGCCCATCGGTCTTCC | | |
| GS-281 | | | CCCTGGCACCCTGCTCCAAGAGCACCTC | | |
| | | | TGGGGGCACAGCGGCCCTGGGCGGATCC | | |
| | | | (SEQ ID NO: 252) | | |
| | | | ASTKGPSVFPLAPCSKSTSGGTAALGGS | | |
| 281VL4-G2 | 281VL4 | 281 | (SEQ ID NO: 253) | 118 to 143 | 28 |
| (118-143) | | | GCTAGCACCAAGGGCCCATCGGTCTTCC | | |
| GS-281 | | | CCCTGGCGCCCTGCTCCAGGAGCACCTC | | |
| | | | CGAGAGCACAGCCGCCCTGGGCGGATCC | | |
| | | | (SEQ ID NO: 254) | | |
| | | | ASTKGPSVFPLAPCSRSTSESTAALGGS | | |
| 281VL4-G3 | 281VL4 | 281 | (SEQ ID NO: 255) | 118 to 143 | 28 |
| (118-143) | | | GCTAGCACCAAGGGCCCATCGGTCTTCC | | |
| GS-281 | | | CCCTGGCGCCCTGCTCCAGGAGCACCTC | | |
| | | | TGGGGGCACAGCGGCCCTGGGCGGATCC | | |
| | | | (SEQ ID NO: 256) | | |
| | | | ASTKGPSVFPLAPCSRSTSGGTAALGGS | | |
| 281VL4-HGP | 281VL4 | 281 | (SEQ ID NO: 257) | 118 to 143 | 28 |
| (118-143) | | | GCTAGCACCAAGGGCCCATCGGTCTTCC | | |
| GS-281 | | | CCCTGGTGCCCTGCTCCAGGAGCGTCTC | | |
| | | | TGAGGGCACAGCGGCCCTGGGCGGATCC | | |
| | | | (SEQ ID NO: 258) | | |
| | | | ASTKGPSVFPLVPCSRSVSEGTAALGGS | | |
| 281VL4-M | 281VL4 | 281 | (SEQ ID NO: 259) | 118 to 143 | 29 |
| (118-143) | | | GGGAGTGCATCCGCCCCAACCCTTTTCC | | |
| GS-281 | | | CCCTCGTCTCCTGTGAGAATTCCCCGTCG | | |
| | | | GATACGAGCAGCGTGGCCGTTGGCGGAT | | |
| | | | CC | | |
| | | | (SEQ ID NO: 260) | | |
| | | | GSASAPTLFPLVSCENSPSDTSSVAVGGS | | |

### Example 37

[0286] Preparation of Multivalent Antibody Expression Vector comprising Antigen Recognition Site for CD28 (281VL4 Origin) at N-terminal Side, Antigen Recognition Site for CD40 (281 Origin) at C-terminal Side and Linker represented by SEQ ID NO:244, 246, 250, 252, 254, 256, or 258

[0287] In order to produce a multivalent antibody comprising the recognition site for CD28 and the recognition site for CD40 in order from the N-terminal side of the heavy chain, the heavy chain variable region of the anti-CD28 antibody 281VL4 was linked in tandem to the heavy chain variable region of the anti-CD40 antibody 281 from the N-terminal side via a linker (SEQ ID NO:244, 246, 250, 252, 254, 256, or 258). Since the same light chain is used for both the anti-281 antibody and the anti-CD28 antibody, the expression vector comprises one type of light chain sequence.

[0288] The gene sequences encoding the heavy chains of these antibodies were prepared based on the procedure of the genetic method used in Example 24.

[0289] Each of 281VL4-A1(118-143)GS-281 heavy chain nucleic acid sequence (SEQ ID NO:261), 281VL4-A1(118-143)GS-281 heavy chain amino acid sequence (SEQ ID NO:262), 281VL4-A2(118-143)GS-281 heavy chain nucleic acid sequence (SEQ ID NO:263), 281VL4-A2(118-143)GS-281 heavy chain amino acid sequence (SEQ ID NO:264), 281VL4-E(118-143)GS-281 heavy chain nucleic acid sequence (SEQ ID NO:265), 281VL4-E(118-143)GS-281 heavy chain amino acid sequence (SEQ ID NO:266), 281VL4-G1(118-143)GS-281 heavy chain nucleic acid sequence (SEQ ID NO:267), 281VL4-G1(118-143)GS-281 heavy chain amino acid sequence (SEQ ID NO:268), 281VL4-G2(118-143)GS-281 heavy chain nucleic acid sequence (SEQ ID NO:269), 281VL4-G2(118-143)GS-281 heavy chain amino acid sequence (SEQ ID NO:270), 281VL4-G3(118-143)GS-281 heavy chain nucleic acid sequence (SEQ ID NO:271), 281VL4-G3(118-143)GS-281 heavy chain amino acid sequence (SEQ ID NO:272), 281VL4-HGP(118-143)GS-281 heavy chain nucleic acid sequence (SEQ ID NO:273), and 281VL4-HGP(118-143)GS-281 heavy chain amino acid sequence (SEQ ID NO:274) is shown in the Sequence Listing.

### Example 38

[0290] Preparation of Multivalent Antibody Expression Vector comprising Antigen Recognition Site for CD28 (281VL4 Origin) at N-terminal Side, Antigen Recognition Site for CD40 (281 Origin) at C-terminal Side and Linker represented by SEQ ID NO:248 or 260

[0291] In order to produce the multivalent antibody comprising the recognition site for CD28 and the recognition site for CD40 in a row in order from the heavy chain N-terminal side, the heavy chain variable region of the anti-CD28 antibody 281VL4 was linked in tandem to the heavy chain variable region of the anti-CD40 antibody 281 from the N-terminal side via a linker (SEQ ID NO:248 or 260). Since the same light chain is used for both the anti-281 antibody and the anti-CD28 antibody, the expression vector comprises one type of light chain sequence.

[0292] The gene sequence encoding the heavy chain of 281VL4-linker (SEQ ID NO:248 and 260)-281 was prepared by the following steps.

[0293] PCR of 30 cycles of reaction at 95° C. for 30 seconds, at 55° C. for 30 seconds, and at 68° C. for 30 minutes as one cycle was carried out using the 281 heavy chain as a template and NheI CD40 Hc L 5′-CTAGCTAGCTGAGGAGACGGTGACCAGGGTTCCCTGGCCCCAGGGGTGG-3′ (SEQ ID NO:275) as the L primer and IgD-CH1-CD40 U 5′-GCCCTGTGGTCCTGGCAggatccCAGGTGCAGCTGCAGGAGTCGGGCCC-3′ (SEQ ID NO:276) and IgM-CH1-CD40 U 5′-ACGAGCAGCGTGGCCGTTGGCggatccCAGGTGCAGCTGCAGGAGTCG-3′ (SEQ ID NO:277) as the U primer, and using DNA polymerase (KOD-Plus, manufactured by Toyobo Co. Ltd). Furthermore, PCR of 30 cycles of reaction at 95° C. for 30 seconds, at 55° C. for 30 seconds, and at 68° C. for 30 seconds as one cycle was carried out using the obtained PCR product as a template and NheI CD40 Hc L 5′-CTAGCTAGCTGAGGAGACGGTGACCAGGGTTCCCTGGCCCCAGGGGTGG-3′ (SEQ ID NO:275) as the L primer and IgD-CH1-2U 5′-CATATCAGGGTGCAGACACCCAAAGGATAACAGCCCTGTGGTCCTGGCA-3′ (SEQ ID NO:278) and IgM-CH1-2 U 5′-CTCGTCTCCTGTGAGAATTCCCCGTCGGATACGAGCAGCGTGGCCGTTG-3′(SEQ ID NO:279) as the U primer, and using DNA polymerase (KOD-Plus, manufactured by Toyobo Co. Ltd). Moreover, PCR of 30 cycles of reaction at 95° C. for 30 seconds, at 55° C. for 30 seconds, and at 68° C. for 30 seconds as one cycles was carried out using the obtained PCR product as a template and NheI CD40 Hc L 5′-CTAGCTAGCTGAGGAGACGGTGACCAGGGTTCCCTGGCCCCAGGGGTGG-3′(SEQ ID NO:275) as the L primer and IgD-CH1U 5′-GCACCCACCAAGGCTCCGGATGTGTTCCCCATCATATCAGGGTGCAGAC-3′(SEQ ID NO:280) and IgMCH1U 5′-GGGAGTGCATCCGCCCCAACCCTTTTCCCCCTCGTCTCCTGTGAGAATT-3′ (SEQ ID NO:281) as the U primer, and using DNA polymerase (KOD-Plus, manufactured by Toyobo Co. Ltd), and thereby the linker-281 heavy chain-NheI gene fragment having the NheI sequence at the 3′-terminal was prepared. On the other hand, PCR of 30 cycles of reaction at 95° C. for 30 seconds, at 55° C. for 30 seconds, and at 68° C. for 30 seconds as one cycle was carried out using 281VL4 heavy chain sequence as a template and 5′-GGGGTCGACACCATGAAGCACCTGTGGTTCTTCCTCCTGCTGGTGGCGG-3′ (SEQ ID NO:138) as the U primer and CD28-IgD L 5′-CATCCGGAGCCTTGGTGGGTGCTGAGGAGACGGTGACCATTGTCCCTTG-3′ (SEQ ID NO:282) and CD28-IgM L 5′-GGGTTGGGGCGGATGCACTCCCTGAGGAGACGGTGACCATTGTCCCTTG-3′ (SEQ ID NO:283) as the L primer, and using DNA polymerase (KOD-Plus, manufactured by Toyobo Co. Ltd) to prepare SalI-281VL4-linker gene fragment comprising the SalI sequence at the 5′-terminal was prepared. The SalI-281VL4-linker gene fragment and the linker-281-heavy chain-NheI gene fragment were linked with Over Extension PCR, and PCR of 30 cycles of reaction at 95° C. for 30 seconds, at 55° C. for 30 seconds, and at 68° C. for 30 seconds as one cycle was carried out using 5′-GGGGTCGACACCATGAAGCACCTGTGGTTCTTCCTCCTGCTGGTGGCGG-3′(SEQ ID NO:138) and NheI CD40 Hc L 5′-CTAGCTAGCTGAGGAGACGGTGACCAGGGTTCCCTGGCCCCAGGGGTGG-3′ (SEQ ID NO:275) and using DNA polymerase (KOD-Plus, manufactured by Toyobo Co. Ltd) to prepare SalI-281VL4-linker-281-NheI gene fragment comprising the SalI sequence at the 5′-terminal and the NheI sequence at the 3′-terminal. This gene fragment was digested with SalI and NheI and inserted into the 281VL4 expression vector digested with SalI and NheI. Each of the 281VL4-D(118-143)GS-281 heavy chain nucleic acid sequence (SEQ ID NO:284), the 281VL4-D(118-143)GS-281 heavy chain amino acid sequence (SEQ ID NO:285), the 281VL4-M(118-143)GS-281 heavy chain nucleic acid sequence (SEQ ID NO:286), and the 281VL4-M(118-143)GS-281 heavy chain amino acid sequence (SEQ ID NO:287) is shown in the Sequence Listing.

### Example 39

[0294] Expression and Purification of Multivalent Antibody comprising Antigen Recognition Site for CD28 (281VL4 Origin) at N-terminal Side, Antigen Recognition Site for CD40 (281 Origin) at C-terminal Side and Linker represented by any one of SEQ IDs NO:244 to 260

[0295] The prepared expression vector gene was obtained using QIAGEN Plasmid Maxi Kit (manufactured by Qiagen) and introduced into nonadherent 293 cells using FreeStyle™ 293 Expression System (Invitrogen by Life Technologies Corporation) to obtain culture supernatant containing each antibody by transient expression. The purified antibody was obtained from this culture supernatant in accordance with the procedure of Example 16. In regard to the density of the purified antibody, the absorbance at 280 nm was measured, and the density of the 1 mg/mL antibody was assumed to be 1.40 optimal density for the calculation.

### Example 40

[0296] Measurement of Productivity of Multivalent Antibody comprising Antigen Recognition Site for CD28 (281VL4 Origin) at N-terminal Side, Antigen Recognition Site for CD40 (281 Origin) at C-terminal Side and Linker represented by any one of SEQ ID NOs:244 to 260

[0297] The antibody containing amount in the respective culture supernatants was measured to know the productivity of the antibody. The antibody content was measured in accordance with the procedure of Example 17. The result is shown in Table 16.

TABLE 16
Productivity of Each Antibody

| | Antibody | Number of |
|---|---|---|
| | Density in Culture | Amino Acid in |
| Name of Multivalent Antibody | Supernatant (μg/mL) | Linker |
| 281VL4-A1(118-143)GS-281 | 30.43 | 27 |
| 281VL4-A2(118-143)GS-281 | 30.37 | 27 |
| 281VL4-D(118-143)GS-281 | 34.81 | 29 |
| 281VL4-E(118-143)GS-281 | 32.40 | 30 |
| 281VL4-G1(118-143)GS-281 | 29.31 | 28 |
| 281VL4-G2(118-143)GS-281 | 28.13 | 28 |
| 281VL4-G3(118-143)GS-281 | 29.77 | 28 |
| 281VL4-HGP(118-143)GS-281 | 26.45 | 28 |
| 281VL4-M(118-144)GS-281 | 42.21 | 29 |

### Example 41

[0298] Evaluation of Stability of Multivalent Antibody comprising Antigen Recognition Site for CD28 (281VL4 Origin) at N-terminal Side, Antigen Recognition Site for CD40 (281 Origin) at C-terminal Side and Linker represented by any one of SEQ ID NOs:244 to 260

[0299] The aggregate containing rate of the antibody solution was measured by the steps in Example 18. The result is shown in Table 17.

TABLE 17
Aggregate Content of Respective Purified Antibody

| | Aggregate | Amino Acid |
|---|---|---|
| Name of Multivalent Antibody | Content (%) | Number of Linker |
| 281VL4-A1(118-143)GS-281 | 2.477 | 27 |
| 281VL4-A2(118-143)GS-281 | 2.831 | 27 |
| 281VL4-D(118-143)GS-281 | 2.562 | 29 |
| 281VL4-E(118-143)GS-281 | 2.565 | 30 |
| 281VL4-G1(118-143)GS-281 | 1.566 | 28 |
| 281VL4-G2(118-143)GS-281 | 2.352 | 28 |
| 281VL4-G3(118-143)GS-281 | 2.207 | 28 |
| 281VL4-HGP(118-143)GS-281 | 3.542 | 28 |
| 281VL4-M(118-143)GS-281 | 3.416 | 29 |

### Example 42

[0300] Structure of Multivalent Antibody comprising Antigen Recognition Site for CD28 (281VL4 Origin) at N-terminal Side, Antigen Recognition Site for CD40 (281 Origin) at C-terminal Side and Sequence (SEQ ID NO:254, 289, 291, 293, 295, 297, 299, 301, 303, 305, 307, 309, or 311) in CH1 Region of IgG2 as a Linker

[0301] In order to prepare a multivalent antibody comprising the recognition site for CD28 and the recognition site for CD40 in a row in order from the N-terminal side of the heavy chain, the amino acid of the CH1 sequence of the human IgG2 (positions 118 to 143 of the EU index of Kabat) shown in Table 6 was deleted one by one from C-terminal side (positions 118 to 131 of the EU index of Kabat). To each obtained sequence, the BamHI sequence, GS (GGATCC), was added at the 3′-terminal to be a linker. The obtained linkers were represented by SEQ ID NOs:254, 289, 291, 293, 295, 297, 299, 301, 303, 305, 307, 309 and 311, respectively. The heavy chain variable region of anti-CD28 antibody 281VL4 was linked in tandem to the heavy chain variable region of anti-CD40 antibody 281 from the N-terminal side via each linker.

[0302] These multivalent antibodies were named 281VL4-G2(118-143)GS-281, 281VL4-G2(118-142)GS-281, 281VL4-G2(118-141)GS-281, 281VL4-G2(118-140)GS-281, 281VL4-G2(118-139)GS-281, 281VL4-G2(118-138)GS-281, 281VL4-G2(118-137)GS-281, 281VL4-G2(118-136)GS-281, 281VL4-G2(118-135)GS-281, 281VL4-G2(118-134)GS-281, 281VL4-G2(118-133)GS-281, 281VL4-G2(118-132)GS-281, and 281VL4-G2(118-131)GS-281, respectively. In addition, 281VL4-G2(118-143)GS-281 was shown in Example 36. Moreover, as a multivalent antibody using positions 118-131 of the EU index of Kabat as a linker, 281VL4-CH1(118-131)-281 shown in Example 24 was used.

[0303] Table 18 shows the structures of the produced multivalent antibodies.

TABLE 18
Structures of Multivalent Antibody

| | Antibody | Antibody | | | Linker |
|---|---|---|---|---|---|
| Mulitvalent | Name Used at | Name Used at | | | Amino |
| Antibody | N-terminal | C-terminal | Base Sequence of Linker (SEQ ID NO:) | EU index | Acid |
| Name | Side | Side | Amino Acid Sequence of Linker (SEQ ID NO:) | of Kabat | Number |
| 281VL4-G2 | 281VL4 | 281 | (SEQ ID NO: 253) | 118 to 143 | 28 |
| (118-143) | | | GCTAGCACCAAGGGCCCATCGGTCTTCCCC | | |
| GS-281 | | | CTGGCGCCCTGCTCCAGGAGCACCTCCGA | | |
| | | | GAGCACAGCCGCCCTGGGCGGATCC | | |
| | | | (SEQ ID NO: 254) | | |
| | | | ASTKGPSVFPLAPCSRSTSESTAALGGS | | |
| 281VL4-G2 | 281VL4 | 281 | (SEQ ID NO: 288) | 118 to 142 | 27 |
| (118-142) | | | GCTAGCACCAAGGGCCCATCGGTCTTCCCC | | |
| GS-281 | | | CTGGCGCCCTGCTCCAGGAGCACCTCCGA | | |
| | | | GAGCACAGCCGCCCTGGGATCC | | |
| | | | (SEQ ID NO: 289) | | |
| | | | ASTKGPSVFPLAPCSRSTSESTAALGS | | |
| 281VL4-G2 | 281VL4 | 281 | (SEQ ID NO: 290) | 118 to 141 | 26 |
| (118-141) | | | GCTAGCACCAAGGGCCCATCGGTCTTCCCC | | |
| GS-281 | | | CTGGCGCCCTGCTCCAGGAGCACCTCCGA | | |
| | | | GAGCACAGCCGCCGGATCC | | |
| | | | (SEQ ID NO: 291) | | |
| | | | ASTKGPSVFPLAPCSRSTSESTAAGS | | |
| 281VL4- | 281VL4 | 281 | (SEQ ID NO: 292) | 118 to 140 | 25 |
| G2(118- | | | GCTAGCACCAAGGGCCCATCGGTCTTCCCC | | |
| 140)GS-281 | | | CTGGCGCCCTGCTCCAGGAGCACCTCCGA | | |
| | | | GAGCACAGCCGGATCC | | |
| | | | (SEQ ID NO: 293) | | |
| | | | ASTKGPSVFPLAPCSRSTSESTAGS | | |
| 281VL4- | 281VL4 | 281 | (SEQ ID NO: 294) | 118 to 139 | 24 |
| G2(118- | | | GCTAGCACCAAGGGCCCATCGGTCTTCCCC | | |
| 139)GS-281 | | | CTGGCGCCCTGCTCCAGGAGCACCTCCGA | | |
| | | | GAGCACAGGATCC | | |
| | | | (SEQ ID NO: 295) | | |
| | | | ASTKGPSVFPLAPCSRSTSESTGS | | |
| 281VL4- | 281VL4 | 281 | (SEQ ID NO: 296) | 118 to 138 | 23 |
| G2(118- | | | GCTAGCACCAAGGGCCCATCGGTCTTCCCC | | |
| 138)GS-281 | | | CTGGCGCCCTGCTCCAGGAGCACCTCCGA | | |
| | | | GAGCGGATCC | | |
| | | | (SEQ ID NO: 297) | | |
| | | | ASTKGPSVFPLAPCSRSTSESGS | | |
| 281VL4- | 281VL4 | 281 | (SEQ ID NO: 298) | 118 to 137 | 22 |
| G2(118- | | | GCTAGCACCAAGGGCCCATCGGTCTTCCCC | | |
| 137)GS-281 | | | CTGGCGCCCTGCTCCAGGAGCACCTCCGA | | |
| | | | GGGATCC | | |
| | | | (SEQ ID NO: 299) | | |
| | | | ASTKGPSVFPLAPCSRSTSEGS | | |
| 281VL4- | 281VL4 | 281 | (SEQ ID NO:300) | 118 to 136 | 21 |
| G2(118 | | | GCTAGCACCAAGGGCCCATCGGTCTTCCCC | | |
| 136)GS-281 | | | CTGGCGCCCTGCTCCAGGAGCACCTCCGG | | |
| | | | ATCC | | |
| | | | (SEQ ID NO: 301) | | |
| | | | ASTKGPSVFPLAPCSRSTSGS | | |
| 281VL4- | 281VL4 | 281 | (SEQ ID NO: 302) | 118 to 135 | 20 |
| G2(118 - | | | GCTAGCACCAAGGGCCCATCGGTCTTCCCC | | |
| 135)GS-281 | | | CTGGCGCCCTGCTCCAGGAGCACCGGATC | | |
| | | | C | | |
| | | | (SEQ ID NO: 303) | | |
| | | | ASTKGPSVFPLAPCSRSTGS | | |
| 281VL4- | 281VL4 | 281 | (SEQ ID NO: 304) | 118 to 134 | 19 |
| G2(118- | | | GCTAGCACCAAGGGCCCATCGGTCTTCCCC | | |
| 134)GS-281 | | | CTGGCGCCCTGCTCCAGGAGCGGATCC | | |
| | | | (SEQ ID NO: 305) | | |
| | | | ASTKGPSVFPLAPCSRSGS | | |
| 281VL4- | 281VL4 | 281 | (SEQ ID NO: 306) | 118 to 133 | 18 |
| G2(118- | | | GCTAGCACCAAGGGCCCATCGGTCTTCCCC | | |
| 133)GS-281 | | | CTGGCGCCCTGCTCCAGGGGATCC | | |
| | | | (SEQ ID NO: 307) | | |
| | | | ASTKGPSVFPLAPCSRGS | | |
| 281VL4- | 281VL4 | 281 | (SEQ ID NO: 308) | 118 to 132 | 17 |
| G2(118- | | | GCTAGCACCAAGGGCCCATCGGTCTTCCCC | | |
| 132)GS-281 | | | CTGGCGCCCTGCTCCGGATCC | | |
| | | | (SEQ ID NO:309) | | |
| | | | ASTKGPSVFPLAPCSGS | | |
| 281VL4- | 281VL4 | 281 | (SEQ ID NO: 310) | 118 to 131 | 14 |
| G2(118- | | | GCTAGCACCAAGGGCCCATCGGTCTTCCCC | | |
| 131)GS-281 | | | CTGGCGCCCTGC | | |
| | | | (SEQ ID NO: 311) | | |
| | | | ASTKGPSVFPLAPC | | |

### Example 43

[0304] Preparation of Multivalent Antibody Expression Vector comprising Antigen Recognition Site for CD28 (281VL4 Origin) at N-terminal Side, Antigen Recognition Site for CD40 (281 Origin) at C-terminal Side and Linker represented by SEQ ID NO:289, 291, 293, 295, 297, 299, 301, 303, 305, 307, or 309

[0305] In order to produce a multivalent antibody comprising the recognition site for CD28 and the recognition site for CD40 in order from the heavy chain N-terminal side, the heavy chain variable region of anti-CD28 antibody 281VL4 was linked in tandem from the N-terminal side to the heavy chain variable region of anti-CD40 antibody 281 via a linker (SEQ ID NO:289, 291, 293, 295, 297, 299, 301, 303, 305, 307, or 309). Since the same light chain is used for both the anti-281 antibody and the anti-CD28 antibody, the expression vector comprises one type of light chain sequence. The gene sequence encoding the heavy chains of these antibodies was produced based on the procedure of the genetic method used in Example 24.

[0306] Each of 281VL4-G2(118-142)GS-281 heavy chain nucleic acid sequence (SEQ ID NO:312), 281VL4-G2(118-142)GS-281 heavy chain amino acid sequence (SEQ ID NO:313), 281VL4-G2(118-141)GS-281 heavy chain nucleic acid sequence (SEQ ID NO:314), 281VL4-G2(118-141)GS-281 heavy chain amino acid sequence (SEQ ID NO:315), 281VL4-G2(118-140)GS-281 heavy chain nucleic acid sequence (SEQ ID NO:316), 281VL4-G2(118-140)GS-281 heavy chain amino acid sequence (SEQ ID NO:317), 281VL4-G2(118-139)GS-281 heavy chain nucleic acid sequence (SEQ ID NO:318), 281VL4-G2(118-139)GS-281 heavy chain amino acid sequence (SEQ ID NO:319), 281VL4-G2(118-138)GS-281 heavy chain nucleic acid sequence (SEQ ID NO:320), 281VL4-G2(118-138)GS-281 heavy chain amino acid sequence (SEQ ID NO:321), 281VL4-G2(118-137)GS-281 heavy chain nucleic acid sequence (SEQ ID NO:322), 281VL4-G2(118-137)GS-281 heavy chain amino acid sequence (SEQ ID NO:323), 281VL4-G2(118-136)GS-281 heavy chain nucleic acid sequence (SEQ ID NO:324), 281VL4-G2(118-136)GS-281 heavy chain amino acid sequence (SEQ ID NO:325), 281VL4-G2(118-135)GS-281 heavy chain nucleic acid sequence (SEQ ID NO:326), 281VL4-G2(118-135)GS-281 heavy chain amino acid sequence (SEQ ID NO:327), 281VL4-G2(118-134)GS-281 heavy chain nucleic acid sequence (SEQ ID NO:328), 281VL4-G2(118-134)GS-281 heavy chain amino acid sequence (SEQ ID NO:329), 281VL4-G2(118-133)GS-281 heavy chain nucleic acid sequence (SEQ ID NO:330), 281VL4-G2(118-133)GS-281 heavy chain amino acid sequence (SEQ ID NO:331), 281VL4-G2(118-132)GS-281 heavy chain nucleic acid sequence (SEQ ID NO:332) and 281VL4-G2(118-132)GS-281 heavy chain amino acid sequence (SEQ ID NO:333) is shown in the Sequence Listing.

### Example 44

[0307] Expression and Purification of Multivalent Antibody

[0308] The produced expression vector gene was obtained using QIAGEN Plasmid Maxi Kit (manufactured by Qiagen) and introduced into nonadherent 293 cells using FreeStyle™ 293 Expression System (Invitrogen by Life Technologies Corporation) to obtain culture supernatant containing each antibody was obtained by transient expression. The purified antibody was obtained from the culture supernatant in accordance with the procedure in Example 16. In regard to the density of the purified antibody, the absorbance at 280 nm was measured, and the density of the 1 mg/mL antibody was assumed to be 1.40 optimal density for the calculation.

### Example 45

[0309] Measurement of Antibody Productivity

[0310] The antibody containing amount in the respective culture supernatant was measured to know the productivity of the antibody. The measurement of the antibody content was carried out in accordance with the procedure of Example 17. The result is shown in Table 19.

TABLE 19
Productivity of Respective Antibodies

| | Antibody Density | |
|---|---|---|
| | in Culture | |
| | Supernatant | Number of Linker |
| Name of Multivalent Antibody | (μg/mL) | Amino Acid |
| 281VL4-G2(118-143)GS-281 | 30.70 | 28 |
| 281VL4-G2(118-142)GS-281 | 33.68 | 27 |
| 281VL4-G2(118-141)GS-281 | 35.77 | 26 |
| 281VL4-G2(118-140)GS-281 | 35.95 | 25 |
| 281VL4-G2(118-139)GS-281 | 33.31 | 24 |
| 281VL4-G2(118-138)GS-281 | 32.72 | 23 |
| 281VL4-G2(118-137)GS-281 | 31.69 | 22 |
| 281VL4-G2(118-136)GS-281 | 1.28 | 21 |
| 281VL4-G2(118-135)GS-281 | 28.09 | 20 |
| 281VL4-G2(118-134)GS-281 | 0.44 | 19 |
| 281VL4-G2(118-133)GS-281 | 1.46 | 18 |
| 281VL4-G2(118-132)GS-281 | 34.78 | 17 |
| 281VL4-CH1(118-131)-281 | 35.91 | 14 |

### Example 46

[0311] Evaluation for Antibody Stability

[0312] The aggregate content of the antibody solution was measured in accordance with the procedure of Example 18. The result is shown in Table 20.

TABLE 20
Aggregate Content of Respective Purified Antibody

| | | Number of Linker |
|---|---|---|
| | Aggregate Content (%) | Amino Acid |
| 281VL4-G2(118-143)GS-281 | 1.865 | 27 |
| 281VL4-G2(118-142)GS-281 | 1.875 | 26 |
| 281VL4-G2(118-141)GS-281 | 1.907 | 25 |
| 281VL4-G2(118-140)GS-281 | 1.921 | 24 |
| 281VL4-G2(118-139)GS-281 | 1.786 | 23 |
| 281VL4-G2(118-138)GS-281 | 1.619 | 22 |
| 281VL4-G2(118-137)GS-281 | 1.546 | 21 |
| 281VL4-G2(118-136)GS-281 | — | 20 |
| 281VL4-G2(118-135)GS-281 | 1.254 | 19 |
| 281VL4-G2(118-134)GS-281 | — | 18 |
| 281VL4-G2(118-133)GS-281 | — | 17 |
| 281VL4-G2(118-132)GS-281 | 1.522 | 16 |
| 281VL4-CH1(118-131)-281 | 1.246 | 14 |

### INDUSTRIAL APPLICABILITY

[0313] The antibody of the present invention exhibits high stability and a characteristic that the antibody can be produced with high productivity, and has usability as an antibody for a drug or in diagnosis.

[0314] All the publications, patents, and patent applications, which were cited in this specification, are incorporated herein as reference.

The application's sequence listing, which the Patent Office published only in electronic form, follows.

SEQUENCE LISTING (375 sequences)

SEQ ID NO: 1 - DNA, 1480 bp, Homo sapiens
gtcgacgctgaattctggctgaccagggcagccaccagagctccagacaatgtctgtctccttcctcatcttcctgcccgtgctgggcctcccatggggtgtcctgtcacaggtccaactgcagcagtcaggtccaggactggtgaagccctcgcagaccctctcactcacctgtgccatctccggggacagtgtctctagcaacagtgctacttggaactggatcaggcagtccccatcgagagaccttgagtggctgggaaggacatactacaggtccaagtggtatcgtgattatgtaggatctgtgaaaagtcgaataatcatcaacccagacacatccaacaaccagttctccctgcagctgaactctgtgactcccgaggacacggctatatattactgtacaagagcacagtggctgggaggggattacccctactactacagtatggacgtctggggccaagggaccacggtcaccgtctcttcagcctccaccaagggcccatcggtcttccccctggcgccctgctccaggagcacctccgagagcacagcggccctgggctgcctggtcaaggactacttccccgaaccggtgacggtgtcgtggaactcaggcgctctgaccagcggcgtgcacaccttcccagctgtcctacagtcctcaggactctactccctcagcagcgtggtgaccgtgccctccagcaacttcggcacccagacctacacctgcaacgtagatcacaagcccagcaacaccaaggtggacaagacagttgagcgcaaatgttgtgtcgagtgcccaccgtgcccagcaccacctgtggcaggaccgtcagtcttcctcttccccccaaaacccaaggacaccctcatgatctcccggacccctgaggtcacgtgcgtggtggtggacgtgagccacgaagaccccgaggtccagttcaactggtacgtggacggcgtggaggtgcataatgccaagacaaagccacgggaggagcagttcaacagcacgttccgtgtggtcagcgtcctcaccgttgtgcaccaggactggctgaacggcaaggagtacaagtgcaaggtctccaacaaaggcctcccagcccccatcgagaaaaccatctccaaaaccaaagggcagccccgagaaccacaggtgtacaccctgcccccatcccgggaggagatgaccaagaaccaggtcagcctgacctgcctggtcaaaggcttctaccccagcgacatcgccgtggagtgggagagcaatgggcagccggagaacaactacaagaccacacctcccatgctggactcagacggctccttcttcctctacagcaagctcaccgtggacaagagcaggtggcagcaggggaacgtcttctcatgctccgtgatgcatgaggctctgcacaaccactacacgcagaagagcctctccctgtctccgggtaaatgaggatcc

SEQ ID NO: 2 - protein, 474 aa, Homo sapiens
MSVSFLIFLPVLGLPWGVLSQVQLQQSGPGLVKPSQTLSLTCAISGDSVSSNSATWNWIRQSPSRDLEWLGRTYYRSKWYRDYVGSVKSRIIINPDTSNNQFSLQLNSVTPEDTAIYYCTRAQWLGGDYPYYYSMDVWGQGTTVTVSSASTKGPSVFPLAPCSRSTSESTAALGCLVKDYFPEPVTVSWNSGALTSGVHTFPAVLQSSGLYSLSSVVTVPSSNFGTQTYTCNVDHKPSNTKVDKTVERKCCVECPPCPAPPVAGPSVFLFPPKPKDTLMISRTPEVTCVVVDVSHEDPEVQFNWYVDGVEVHNAKTKPREEQFNSTFRVVSVLTVVHQDWLNGKEYKCKVSNKGLPAPIEKTISKTKGQPREPQVYTLPPSREEMTKNQVSLTCLVKGFYPSDIAVEWESNGQPENNYKTTPPMLDSDGSFFLYSKLTVDKSRWQQGNVFSCSVMHEALHNHYTQKSLSLSPGK

SEQ ID NO: 3 - DNA, 406 bp, Homo sapiens
actgctcagttaggacccagagggaaccatggaagccccagctcagcttctcttcctcctgctactctggctcccagataccaccggagaaattgtgttgacacagtctccagccaccctgtctttgtctccaggggaaagagccaccctctcctgcagggccagtcagagtgttagcagctacttagcctggtaccaacagaaacctggccaggctcccaggctcctcatctatgatgcatccaacagggccactggcatcccagccaggttcagtggcagtgggtctgggacagacttcactctcaccatcagcagcctagagcctgaagattttgcagtttattactgtcagcagcgtagcaacactttcggccctgggaccaaagtggatatcaaacgtacg

SEQ ID NO: 4 - protein, 126 aa, Homo sapiens
MEAPAQLLFLLLLWLPDTTGEIVLTQSPATLSLSPGERATLSCRASQSVSSYLAWYQQKPGQAPRLLIYDASNRATGIPARFSGSGSGTDFTLTISSLEPEDFAVYYCQQRSNTFGPGTKVDIKRT

SEQ ID NO: 5 - DNA, 45 bp, Artificial
  primer
gcaactgcggcccagccggccatggcccaggtgcagctgcaggag

SEQ ID NO: 6 - DNA, 49 bp, Artificial
  primer
ccgaggcgcgcccaccgctgccaccgcctcctgaggagacggtgaccgt

SEQ ID NO: 7 - DNA, 49 bp, Artificial
  primer
cggtgggcgcgcctcgggcggaggtggttcagaaattgtgttgacacag

SEQ ID NO: 8 - DNA, 42 bp, Artificial
  primer
cattctcgagttgcggccgcacgtttgatatccactttggtc

SEQ ID NO: 9 - DNA, 45 bp, Artificial
  Synthetic linker ligating between scFv VH and VL
ggaggcggtggcagcggtgggcgcgcctcgggcggaggtggttca

SEQ ID NO: 10 - protein, 15 aa, Artificial
  Synthetic linker ligating between scFv VH and VL
GGGGSGGRASGGGGS

SEQ ID NO: 11 - DNA, 21 bp, Artificial
  primer
atggactggacctggaggatc

SEQ ID NO: 12 - DNA, 21 bp, Artificial
  primer
atggactggacctggagcatc

SEQ ID NO: 13 - DNA, 21 bp, Artificial
  primer
atggactgcacctggaggatc

SEQ ID NO: 14 - DNA, 21 bp, Artificial
  primer
atggactggacctggagaatc

SEQ ID NO: 15 - DNA, 21 bp, Artificial
  primer
atggactggacctggagggtc

SEQ ID NO: 16 - DNA, 21 bp, Artificial
  primer
atggactggatttggaggatc

SEQ ID NO: 17 - DNA, 21 bp, Artificial
  primer
atggacacactttgctccacg

SEQ ID NO: 18 - DNA, 21 bp, Artificial
  primer
atggacacactttgctacaca

SEQ ID NO: 19 - DNA, 21 bp, Artificial
  primer
atggaattggggctgagctgg

SEQ ID NO: 20 - DNA, 21 bp, Artificial
  primer
atggagttgggactgagctgg

SEQ ID NO: 21 - DNA, 21 bp, Artificial
  primer
atggagtttgggctgagctgg

SEQ ID NO: 22 - DNA, 21 bp, Artificial
  primer
atggagttggggctgagctgg

SEQ ID NO: 23 - DNA, 21 bp, Artificial
  primer
atggaactggggctccgctgg

SEQ ID NO: 24 - DNA, 21 bp, Artificial
  primer
atggagtttggactgagctgg

SEQ ID NO: 25 - DNA, 21 bp, Artificial
  primer
atggagttggggctgtgctgg

SEQ ID NO: 26 - DNA, 21 bp, Artificial
  primer
atggagtttgggcttagctgg

SEQ ID NO: 27 - DNA, 21 bp, Artificial
  primer
atggagttttggctgagctgg

SEQ ID NO: 28 - DNA, 24 bp, Artificial
  primer
atgacggagtttgggctgagctgg

SEQ ID NO: 29 - DNA, 21 bp, Artificial
  primer
atgaaacacctgtggttcttc

SEQ ID NO: 30 - DNA, 21 bp, Artificial
  primer
atgaagcacctgtggttcttc

SEQ ID NO: 31 - DNA, 21 bp, Artificial
  primer
atgaaacatctgtggttcttc

SEQ ID NO: 32 - DNA, 21 bp, Artificial
  primer
atgaagcacctgtggtttttc

SEQ ID NO: 33 - DNA, 21 bp, Artificial
  primer
atggggtcaaccgccatcctc

SEQ ID NO: 34 - DNA, 21 bp, Artificial
  primer
atggggtcaaccgccatcctt

SEQ ID NO: 35 - DNA, 24 bp, Artificial
  primer
atgtctgtctccttcctcatcttc

SEQ ID NO: 36 - DNA, 19 bp, Artificial
  primer
gccagggggaagaccgatg

SEQ ID NO: 37 - DNA, 43 bp, Artificial
  primer
aactgcggcccagccggccatggcccaggtgcagctggtgcag

SEQ ID NO: 38 - DNA, 43 bp, Artificial
  primer
aactgcggcccagccggccatggcccaggtccagcttgtgcag

SEQ ID NO: 39 - DNA, 43 bp, Artificial
  primer
aactgcggcccagccggccatggcccaggttcagctggtgcag

SEQ ID NO: 40 - DNA, 43 bp, Artificial
  primer
aactgcggcccagccggccatggcccaggtccagctggtacag

SEQ ID NO: 41 - DNA, 43 bp, Artificial
  primer
aactgcggcccagccggccatggcccagatgcagctggtgcag

SEQ ID NO: 42 - DNA, 43 bp, Artificial
  primer
aactgcggcccagccggccatggcccaaatgcagctggtgcag

SEQ ID NO: 43 - DNA, 43 bp, Artificial
  primer
aactgcggcccagccggccatggccgaggtccagctggtacag

SEQ ID NO: 44 - DNA, 43 bp, Artificial
  primer
aactgcggcccagccggccatggcccagatcaccttgaaggag

SEQ ID NO: 45 - DNA, 43 bp, Artificial
  primer
aactgcggcccagccggccatggcccaggtcaccttgaaggag

SEQ ID NO: 46 - DNA, 43 bp, Artificial
  primer
aactgcggcccagccggccatggccgaggtgcagctggtggag

SEQ ID NO: 47 - DNA, 43 bp, Artificial
  primer
aactgcggcccagccggccatggccgaagtgcagctggtggag

SEQ ID NO: 48 - DNA, 43 bp, Artificial
  primer
aactgcggcccagccggccatggcccaggtgcagctggtggag

SEQ ID NO: 49 - DNA, 43 bp, Artificial
  primer
aactgcggcccagccggccatggccgaggtgcagctgttggag

SEQ ID NO: 50 - DNA, 43 bp, Artificial
  primer
aactgcggcccagccggccatggcccaggtgcagctgcaggag

SEQ ID NO: 51 - DNA, 43 bp, Artificial
  primer
aactgcggcccagccggccatggcccagctgcagctgcaggag

SEQ ID NO: 52 - DNA, 43 bp, Artificial
  primer
aactgcggcccagccggccatggcccaggtgcagctacagcag

SEQ ID NO: 53 - DNA, 43 bp, Artificial
  primer
aactgcggcccagccggccatggccgaggtgcagctggtgcag

SEQ ID NO: 54 - DNA, 43 bp, Artificial
  primer
aactgcggcccagccggccatggccgaagtgcagctggtgcag

SEQ ID NO: 55 - DNA, 43 bp, Artificial
  primer
aactgcggcccagccggccatggcccaggtacagctgcagcag

SEQ ID NO: 56 - DNA, 43 bp, Artificial
  primer
aactgcggcccagccggccatggcccaggtgcagctggtgcaa

SEQ ID NO: 57 - DNA, 53 bp, Artificial
  primer
ccgaggcgcgcccaccgctgccaccgcctcctgaggagacggtgaccagggtg

SEQ ID NO: 58 - DNA, 53 bp, Artificial
  primer
ccgaggcgcgcccaccgctgccaccgcctcctgaggagacagtgaccagggtg

SEQ ID NO: 59 - DNA, 53 bp, Artificial
  primer
ccgaggcgcgcccaccgctgccaccgcctcctgaagagacggtgaccattgtc

SEQ ID NO: 60 - DNA, 53 bp, Artificial
  primer
ccgaggcgcgcccaccgctgccaccgcctcctgaggagacggtgaccagggtt

SEQ ID NO: 61 - DNA, 53 bp, Artificial
  primer
ccgaggcgcgcccaccgctgccaccgcctcctgaggagacggtgaccgtggtc

SEQ ID NO: 62 - DNA, 663 bp, Homo sapiens
atgctcaggctgctcttggctctcaacttattcccttcaattcaagtaacaggaaacaagattttggtgaagcagtcgcccatgcttgtagcgtacgacaatgcggtcaaccttagctgcaagtattcctacaatctcttctcaagggagttccgggcatcccttcacaaaggactggatagtgctgtggaagtctgtgttgtatatgggaattactcccagcagcttcaggtttactcaaaaacggggttcaactgtgatgggaaattgggcaatgaatcagtgacattctacctccagaatttgtatgttaaccaaacagatatttacttctgcaaaattgaagttatgtatcctcctccttacctagacaatgagaagagcaatggaaccattatccatgtgaaagggaaacacctttgtccaagtcccctatttcccggaccttctaagcccttttgggtgctggtggtggttggtggagtcctggcttgctatagcttgctagtaacagtggcctttattattttctgggtgaggagtaagaggagcaggctcctgcacagtgactacatgaacatgactccccgccgccccgggcccacccgcaagcattaccagccctatgccccaccacgcgacttcgcagcctatcgctcctga

SEQ ID NO: 63 - DNA, 33 bp, Artificial
  primer
atgctcaggctgctcttggctctcaacttattc

SEQ ID NO: 64 - DNA, 27 bp, Artificial
  primer
tcaggagcgataggctgcgaagtcgcg

SEQ ID NO: 65 - DNA, 462 bp, Homo sapiens
atgctcaggctgctcttggctctcaacttattcccttcaattcaagtaacaggaaacaagattttggtgaagcagtcgcccatgcttgtagcgtacgacaatgcggtcaaccttagctgcaagtattcctacaatctcttctcaagggagttccgggcatcccttcacaaaggactggatagtgctgtggaagtctgtgttgtatatgggaattactcccagcagcttcaggtttactcaaaaacggggttcaactgtgatgggaaattgggcaatgaatcagtgacattctacctccagaatttgtatgttaaccaaacagatatttacttctgcaaaattgaagttatgtatcctcctccttacctagacaatgagaagagcaatggaaccattatccatgtgaaagggaaacacctttgtccaagtcccctatttcccggaccttctaagcccttttgg

SEQ ID NO: 66 - DNA, 31 bp, Artificial
  primer
gggggtaccatgctcaggctgctcttggctc

SEQ ID NO: 67 - DNA, 31 bp, Artificial
  primer
gggtctagaccaaaagggcttagaaggtccg

SEQ ID NO: 68 - DNA, 35 bp, Artificial
  primer
aaaggtgtccagtgtgaggtgcagctggtggagtc

SEQ ID NO: 69 - DNA, 20 bp, Artificial
  primer
tgaggagacggtgaccgtgg

SEQ ID NO: 70 - DNA, 69 bp, Artificial
  primer
ggggtcgacaccatggagtttgggctgagctgggttttccttgttgctattttaaaaggtgtccagtgt

SEQ ID NO: 71 - DNA, 25 bp, Artificial
  primer
ggggctagctgaggagacggtgacc

SEQ ID NO: 72 - DNA, 1419 bp, Homo sapiens
atggagtttgggctgagctgggttttccttgttgctattttaaaaggtgtccagtgtgaggtgcagctggtggagtctgggggaggcttggtaaagcctggggggtcccttagactctcctgtggaggctctggattcactttcaataatgcctggatgaactgggtccgccaggctccagggaaggggctggagtgggttggccgcattaaaggcaagactgatggtgggacagcagactacgctgcacccgtgaaaggcagattcaccatctcaagagattattcaaaaaacacgctgtatctgcaaatgaacagcctgacaaccgaggacacagccgtgtattactgtaacacagatctcccgtattactatggttcggggcgttattcgggtatggacgtctggggccaagggaccacggtcaccgtctcctcagctagcaccaagggcccatcggtcttccccctggcgccctgctccaggagcacctccgagagcacagcggccctgggctgcctggtcaaggactacttccccgaaccggtgacggtgtcgtggaactcaggcgctctgaccagcggcgtgcacaccttcccagctgtcctacagtcctcaggactctactccctcagcagcgtggtgaccgtgccctccagcaacttcggcacccagacctacacctgcaacgtagatcacaagcccagcaacaccaaggtggacaagacagttgagcgcaaatgttgtgtcgagtgcccaccgtgcccagcaccacctgtggcaggaccgtcagtcttcctcttccccccaaaacccaaggacaccctcatgatctcccggacccctgaggtcacgtgcgtggtggtggacgtgagccacgaagaccccgaggtccagttcaactggtacgtggacggcgtggaggtgcataatgccaagacaaagccacgggaggagcagttcaacagcacgttccgtgtggtcagcgtcctcaccgttgtgcaccaggactggctgaacggcaaggagtacaagtgcaaggtctccaacaaaggcctcccagcctccatcgagaaaaccatctccaaaaccaaagggcagccccgagaaccacaggtgtacaccctgcccccatcccgggaggagatgaccaagaaccaggtcagcctgacctgcctggtcaaaggcttctaccccagcgacatcgccgtggagtgggagagcaatgggcagccggagaacaactacaagaccacacctcccatgctggactccgacggctccttcttcctctacagcaagctcaccgtggacaagagcaggtggcagcaggggaacgtcttctcatgctccgtgatgcatgaggctctgcacaaccactacacgcagaagagcctctccctgtctccgggtaaatga

SEQ ID NO: 73 - protein, 472 aa, Homo sapiens
MEFGLSWVFLVAILKGVQCEVQLVESGGGLVKPGGSLRLSCGGSGFTFNNAWMNWVRQAPGKGLEWVGRIKGKTDGGTADYAAPVKGRFTISRDYSKNTLYLQMNSLTTEDTAVYYCNTDLPYYYGSGRYSGMDVWGQGTTVTVSSASTKGPSVFPLAPCSRSTSESTAALGCLVKDYFPEPVTVSWNSGALTSGVHTFPAVLQSSGLYSLSSVVTVPSSNFGTQTYTCNVDHKPSNTKVDKTVERKCCVECPPCPAPPVAGPSVFLFPPKPKDTLMISRTPEVTCVVVDVSHEDPEVQFNWYVDGVEVHNAKTKPREEQFNSTFRVVSVLTVVHQDWLNGKEYKCKVSNKGLPASIEKTISKTKGQPREPQVYTLPPSREEMTKNQVSLTCLVKGFYPSDIAVEWESNGQPENNYKTTPPMLDSDGSFFLYSKLTVDKSRWQQGNVFSCSVMHEALHNHYTQKSLSLSPGK

SEQ ID NO: 74 - DNA, 1419 bp, Homo sapiens
atggagtttgggctgagctgggttttccttgttgctattttaaaaggtgtccagtgtgaggtgcagctggtggagtctgggggaggcttggtaaagcctggggggtcccttagactctcctgtggaggctctggattcactttcaataatgcctggatgaactgggtccgccaggctccagggaaggggctggagtgggttggccgcattaaaggcaagactgatggtgggacagcagactacgctgcacccgtgaaaggcagattcaccatctcaagagattattcaaaaaacacgctgtatctgcaaatgaacagcctaaaaaccgaggacacaggcgtgtattactgtaccacatatctcccgtattactatggttcggagagatggtcgggaatggacgtctggggccaagggaccacggtcaccgtctcctcagctagcaccaagggcccatcggtcttccccctggcgccctgctccaggagcacctccgagagcacagcggccctgggctgcctggtcaaggactacttccccgaaccggtgacggtgtcgtggaactcaggcgctctgaccagcggcgtgcacaccttcccagctgtcctacagtcctcaggactctactccctcagcagcgtggtgaccgtgccctccagcaacttcggcacccagacctacacctgcaacgtagatcacaagcccagcaacaccaaggtggacaagacagttgagcgcaaatgttgtgtcgagtgcccaccgtgcccagcaccacctgtggcaggaccgtcagtcttcctcttccccccaaaacccaaggacaccctcatgatctcccggacccctgaggtcacgtgcgtggtggtggacgtgagccacgaagaccccgaggtccagttcaactggtacgtggacggcgtggaggtgcataatgccaagacaaagccacgggaggagcagttcaacagcacgttccgtgtggtcagcgtcctcaccgttgtgcaccaggactggctgaacggcaaggagtacaagtgcaaggtctccaacaaaggcctcccagcctccatcgagaaaaccatctccaaaaccaaagggcagccccgagaaccacaggtgtacaccctgcccccatcccgggaggagatgaccaagaaccaggtcagcctgacctgcctggtcaaaggcttctaccccagcgacatcgccgtggagtgggagagcaatgggcagccggagaacaactacaagaccacacctcccatgctggactccgacggctccttcttcctctacagcaagctcaccgtggacaagagcaggtggcagcaggggaacgtcttctcatgctccgtgatgcatgaggctctgcacaaccactacacgcagaagagcctctccctgtctccgggtaaatga

SEQ ID NO: 75 - protein, 472 aa, Homo sapiens
MEFGLSWVFLVAILKGVQCEVQLVESGGGLVKPGGSLRLSCGGSGFTFNNAWMNWVRQAPGKGLEWVGRIKGKTDGGTADYAAPVKGRFTISRDYSKNTLYLQMNSLKTEDTGVYYCTTYLPYYYGSERWSGMDVWGQGTTVTVSSASTKGPSVFPLAPCSRSTSESTAALGCLVKDYFPEPVTVSWNSGALTSGVHTFPAVLQSSGLYSLSSVVTVPSSNFGTQTYTCNVDHKPSNTKVDKTVERKCCVECPPCPAPPVAGPSVFLFPPKPKDTLMISRTPEVTCVVVDVSHEDPEVQFNWYVDGVEVHNAKTKPREEQFNSTFRVVSVLTVVHQDWLNGKEYKCKVSNKGLPASIEKTISKTKGQPREPQVYTLPPSREEMTKNQVSLTCLVKGFYPSDIAVEWESNGQPENNYKTTPPMLDSDGSFFLYSKLTVDKSRWQQGNVFSCSVMHEALHNHYTQKSLSLSPGK

SEQ ID NO: 76 - DNA, 300 bp, Artificial
  Synthetic 341VL34-CH1-341, 341-CH1-341VL34, 341VL36-CH1-341 or 341-CH1-341VL36 H linker
gctagcaccaagggcccatcggtcttccccctggcgccctgctccaggagcacctccgagagcacagcggccctgggctgcctggtcaaggactacttccccgaaccggtgacggtgtcgtggaactcaggcgctctgaccagcggcgtgcacaccttcccagctgtcctacagtcctcaggactctactccctcagcagcgtggtgaccgtgccctccagcaacttcggcacccagacctacacctgcaacgtagatcacaagcccagcaacaccaaggtggacaagacagttggatcc

SEQ ID NO: 77 - protein, 100 aa, Artificial
  Synthetic 341VL34-CH1-341, 341-CH1-341VL34, 341VL36-CH1-341 or 341-CH1-341VL36 H linker
ASTKGPSVFPLAPCSRSTSESTAALGCLVKDYFPEPVTVSWNSGALTSGVHTFPAVLQSSGLYSLSSVVTVPSSNFGTQTYTCNVDHKPSNTKVDKTVGS

SEQ ID NO: 78 - DNA, 23 bp, Artificial
  primer
ggggctagcaccaagggcccatc

SEQ ID NO: 79 - DNA, 26 bp, Artificial
  primer
ggatccaactgtcttgtccaccttgg

SEQ ID NO: 80 - DNA, 41 bp, Artificial
  primer
gtggacaagacagttggatcccaggtccaactgcagcagtc

SEQ ID NO: 81 - DNA, 27 bp, Artificial
  primer
cttggtgctagctgaggagacggtgac

SEQ ID NO: 82 - DNA, 2103 bp, Artificial
  Synthetic construct of 341VL34-CH1-341 H chain
atggagtttgggctgagctgggttttccttgttgctattttaaaaggtgtccagtgtgaggtgcagctggtggagtctgggggaggcttggtaaagcctggggggtcccttagactctcctgtggaggctctggattcactttcaataatgcctggatgaactgggtccgccaggctccagggaaggggctggagtgggttggccgcattaaaggcaagactgatggtgggacagcagactacgctgcacccgtgaaaggcagattcaccatctcaagagattattcaaaaaacacgctgtatctgcaaatgaacagcctgacaaccgaggacacagccgtgtattactgtaacacagatctcccgtattactatggttcggggcgttattcgggtatggacgtctggggccaagggaccacggtcaccgtctcctcagctagcaccaagggcccatcggtcttccccctggcgccctgctccaggagcacctccgagagcacagcggccctgggctgcctggtcaaggactacttccccgaaccggtgacggtgtcgtggaactcaggcgctctgaccagcggcgtgcacaccttcccagctgtcctacagtcctcaggactctactccctcagcagcgtggtgaccgtgccctccagcaacttcggcacccagacctacacctgcaacgtagatcacaagcccagcaacaccaaggtggacaagacagttggatcccaggtccaactgcagcagtcaggtccaggactggtgaagccctcgcagaccctctcactcacctgtgccatctccggggacagtgtctctagcaacagtgctacttggaactggatcaggcagtccccatcgagagaccttgagtggctgggaaggacatactacaggtccaagtggtatcgtgattatgtaggatctgtgaaaagtcgaataatcatcaacccagacacatccaacaaccagttctccctgcagctgaactctgtgactcccgaggacacggctatatattactgtacaagagcacagtggctgggaggggattacccctactactacagtatggacgtctggggccaagggaccacggtcaccgtctcctcagctagcaccaagggcccatcggtcttccccctggcgccctgctccaggagcacctccgagagcacagcggccctgggctgcctggtcaaggactacttccccgaaccggtgacggtgtcgtggaactcaggcgctctgaccagcggcgtgcacaccttcccagctgtcctacagtcctcaggactctactccctcagcagcgtggtgaccgtgccctccagcaacttcggcacccagacctacacctgcaacgtagatcacaagcccagcaacaccaaggtggacaagacagttgagcgcaaatgttgtgtcgagtgcccaccgtgcccagcaccacctgtggcaggaccgtcagtcttcctcttccccccaaaacccaaggacaccctcatgatctcccggacccctgaggtcacgtgcgtggtggtggacgtgagccacgaagaccccgaggtccagttcaactggtacgtggacggcgtggaggtgcataatgccaagacaaagccacgggaggagcagttcaacagcacgttccgtgtggtcagcgtcctcaccgttgtgcaccaggactggctgaacggcaaggagtacaagtgcaaggtctccaacaaaggcctcccagcctccatcgagaaaaccatctccaaaaccaaagggcagccccgagaaccacaggtgtacaccctgcccccatcccgggaggagatgaccaagaaccaggtcagcctgacctgcctggtcaaaggcttctaccccagcgacatcgccgtggagtgggagagcaatgggcagccggagaacaactacaagaccacacctcccatgctggactccgacggctccttcttcctctacagcaagctcaccgtggacaagagcaggtggcagcaggggaacgtcttctcatgctccgtgatgcatgaggctctgcacaaccactacacgcagaagagcctctccctgtctccgggtaaatga

SEQ ID NO: 83 - protein, 700 aa, Artificial
  Synthetic construct of 341VL34-CH1-341 H chain
MEFGLSWVFLVAILKGVQCEVQLVESGGGLVKPGGSLRLSCGGSGFTFNNAWMNWVRQAPGKGLEWVGRIKGKTDGGTADYAAPVKGRFTISRDYSKNTLYLQMNSLTTEDTAVYYCNTDLPYYYGSGRYSGMDVWGQGTTVTVSSASTKGPSVFPLAPCSRSTSESTAALGCLVKDYFPEPVTVSWNSGALTSGVHTFPAVLQSSGLYSLSSVVTVPSSNFGTQTYTCNVDHKPSNTKVDKTVGSQVQLQQSGPGLVKPSQTLSLTCAISGDSVSSNSATWNWIRQSPSRDLEWLGRTYYRSKWYRDYVGSVKSRIIINPDTSNNQFSLQLNSVTPEDTAIYYCTRAQWLGGDYPYYYSMDVWGQGTTVTVSSASTKGPSVFPLAPCSRSTSESTAALGCLVKDYFPEPVTVSWNSGALTSGVHTFPAVLQSSGLYSLSSVVTVPSSNFGTQTYTCNVDHKPSNTKVDKTVERKCCVECPPCPAPPVAGPSVFLFPPKPKDTLMISRTPEVTCVVVDVSHEDPEVQFNWYVDGVEVHNAKTKPREEQFNSTFRVVSVLTVVHQDWLNGKEYKCKVSNKGLPASIEKTISKTKGQPREPQVYTLPPSREEMTKNQVSLTCLVKGFYPSDIAVEWESNGQPENNYKTTPPMLDSDGSFFLYSKLTVDKSRWQQGNVFSCSVMHEALHNHYTQKSLSLSPGK

SEQ ID NO: 84 - DNA, 41 bp, Artificial
  primer
gtggacaagacagttggatccgaggtgcagctggtggagtc

SEQ ID NO: 85 - DNA, 2106 bp, Artificial
  Synthetic construct of 341-CH1-341VL34 H chain
atgtctgtctccttcctcatcttcctgcccgtgctgggcctcccatggggtgtcctgtcacaggtccaactgcagcagtcaggtccaggactggtgaagccctcgcagaccctctcactcacctgtgccatctccggggacagtgtctctagcaacagtgctacttggaactggatcaggcagtccccatcgagagaccttgagtggctgggaaggacatactacaggtccaagtggtatcgtgattatgtaggatctgtgaaaagtcgaataatcatcaacccagacacatccaacaaccagttctccctgcagctgaactctgtgactcccgaggacacggctatatattactgtacaagagcacagtggctgggaggggattacccctactactacagtatggacgtctggggccaagggaccacggtcaccgtctcctcagctagcaccaagggcccatcggtcttccccctggcgccctgctccaggagcacctccgagagcacagcggccctgggctgcctggtcaaggactacttccccgaaccggtgacggtgtcgtggaactcaggcgctctgaccagcggcgtgcacaccttcccagctgtcctacagtcctcaggactctactccctcagcagcgtggtgaccgtgccctccagcaacttcggcacccagacctacacctgcaacgtagatcacaagcccagcaacaccaaggtggacaagacagttggatccgaggtgcagctggtggagtctgggggaggcttggtaaagcctggggggtcccttagactctcctgtggaggctctggattcactttcaataatgcctggatgaactgggtccgccaggctccagggaaggggctggagtgggttggccgcattaaaggcaagactgatggtgggacagcagactacgctgcacccgtgaaaggcagattcaccatctcaagagattattcaaaaaacacgctgtatctgcaaatgaacagcctgacaaccgaggacacagccgtgtattactgtaacacagatctcccgtattactatggttcggggcgttattcgggtatggacgtctggggccaagggaccacggtcaccgtctcctcagctagcaccaagggcccatcggtcttccccctggcgccctgctccaggagcacctccgagagcacagcggccctgggctgcctggtcaaggactacttccccgaaccggtgacggtgtcgtggaactcaggcgctctgaccagcggcgtgcacaccttcccagctgtcctacagtcctcaggactctactccctcagcagcgtggtgaccgtgccctccagcaacttcggcacccagacctacacctgcaacgtagatcacaagcccagcaacaccaaggtggacaagacagttgagcgcaaatgttgtgtcgagtgcccaccgtgcccagcaccacctgtggcaggaccgtcagtcttcctcttccccccaaaacccaaggacaccctcatgatctcccggacccctgaggtcacgtgcgtggtggtggacgtgagccacgaagaccccgaggtccagttcaactggtacgtggacggcgtggaggtgcataatgccaagacaaagccacgggaggagcagttcaacagcacgttccgtgtggtcagcgtcctcaccgttgtgcaccaggactggctgaacggcaaggagtacaagtgcaaggtctccaacaaaggcctcccagcctccatcgagaaaaccatctccaaaaccaaagggcagccccgagaaccacaggtgtacaccctgcccccatcccgggaggagatgaccaagaaccaggtcagcctgacctgcctggtcaaaggcttctaccccagcgacatcgccgtggagtgggagagcaatgggcagccggagaacaactacaagaccacacctcccatgctggactccgacggctccttcttcctctacagcaagctcaccgtggacaagagcaggtggcagcaggggaacgtcttctcatgctccgtgatgcatgaggctctgcacaaccactacacgcagaagagcctctccctgtctccgggtaaatga

SEQ ID NO: 86 - protein, 701 aa, Artificial
  Synthetic construct of 341-CH1-341VL34 H chain
MSVSFLIFLPVLGLPWGVLSQVQLQQSGPGLVKPSQTLSLTCAISGDSVSSNSATWNWIRQSPSRDLEWLGRTYYRSKWYRDYVGSVKSRIIINPDTSNNQFSLQLNSVTPEDTAIYYCTRAQWLGGDYPYYYSMDVWGQGTTVTVSSASTKGPSVFPLAPCSRSTSESTAALGCLVKDYFPEPVTVSWNSGALTSGVHTFPAVLQSSGLYSLSSVVTVPSSNFGTQTYTCNVDHKPSNTKVDKTVGSEVQLVESGGGLVKPGGSLRLSCGGSGFTFNNAWMNWVRQAPGKGLEWVGRIKGKTDGGTADYAAPVKGRFTISRDYSKNTLYLQMNSLTTEDTAVYYCNTDLPYYYGSGRYSGMDVWGQGTTVTVSSASTKGPSVFPLAPCSRSTSESTAALGCLVKDYFPEPVTVSWNSGALTSGVHTFPAVLQSSGLYSLSSVVTVPSSNFGTQTYTCNVDHKPSNTKVDKTVERKCCVECPPCPAPPVAGPSVFLFPPKPKDTLMISRTPEVTCVVVDVSHEDPEVQFNWYVDGVEVHNAKTKPREEQFNSTFRVVSVLTVVHQDWLNGKEYKCKVSNKGLPASIEKTISKTKGQPREPQVYTLPPSREEMTKNQVSLTCLVKGFYPSDIAVEWESNGQPENNYKTTPPMLDSDGSFFLYSKLTVDKSRWQQGNVFSCSVMHEALHNHYTQKSLSLSPGK

SEQ ID NO: 87 - DNA, 18 bp, Artificial
  Synthetic linker ligating VHs of DVD341VL34-341 and DVD341VL36-341
gctagcaccaagggccca

SEQ ID NO: 88 - protein, 6 aa, Artificial
  Synthetic linker ligating VHs of DVD341VL34-341 and DVD341VL36-341
ASTKGP

SEQ ID NO: 89 - DNA, 18 bp, Artificial
  Synthetic linker ligating VLs of DVD341VL34-341 and DVD341VL36-341
cgtacggtggctgcacca

SEQ ID NO: 90 - protein, 6 aa, Artificial
  Synthetic linker ligating VLs of DVD341VL34-341 and DVD341VL36-341
RTVAAP

SEQ ID NO: 91 - DNA, 47 bp, Artificial
  primer
gtctcctcagctagcaccaagggcccacaggtccaactgcagcagtc

SEQ ID NO: 92 - DNA, 41 bp, Artificial
  primer
gggcgtacggtggctgcaccagaaattgtgttgacacagtc

SEQ ID NO: 93 - DNA, 29 bp, Artificial
  primer
gggcgtacgtttgatatccactttggtcc

SEQ ID NO: 94 - DNA, 1821 bp, Homo sapiens
atggagtttgggctgagctgggttttccttgttgctattttaaaaggtgtccagtgtgaggtgcagctggtggagtctgggggaggcttggtaaagcctggggggtcccttagactctcctgtggaggctctggattcactttcaataatgcctggatgaactgggtccgccaggctccagggaaggggctggagtgggttggccgcattaaaggcaagactgatggtgggacagcagactacgctgcacccgtgaaaggcagattcaccatctcaagagattattcaaaaaacacgctgtatctgcaaatgaacagcctgacaaccgaggacacagccgtgtattactgtaacacagatctcccgtattactatggttcggggcgttattcgggtatggacgtctggggccaagggaccacggtcaccgtctcctcagctagcaccaagggcccacaggtccaactgcagcagtcaggtccaggactggtgaagccctcgcagaccctctcactcacctgtgccatctccggggacagtgtctctagcaacagtgctacttggaactggatcaggcagtccccatcgagagaccttgagtggctgggaaggacatactacaggtccaagtggtatcgtgattatgtaggatctgtgaaaagtcgaataatcatcaacccagacacatccaacaaccagttctccctgcagctgaactctgtgactcccgaggacacggctatatattactgtacaagagcacagtggctgggaggggattacccctactactacagtatggacgtctggggccaagggaccacggtcaccgtctcctcagctagcaccaagggcccatcggtcttccccctggcgccctgctccaggagcacctccgagagcacagcggccctgggctgcctggtcaaggactacttccccgaaccggtgacggtgtcgtggaactcaggcgctctgaccagcggcgtgcacaccttcccagctgtcctacagtcctcaggactctactccctcagcagcgtggtgaccgtgccctccagcaacttcggcacccagacctacacctgcaacgtagatcacaagcccagcaacaccaaggtggacaagacagttgagcgcaaatgttgtgtcgagtgcccaccgtgcccagcaccacctgtggcaggaccgtcagtcttcctcttccccccaaaacccaaggacaccctcatgatctcccggacccctgaggtcacgtgcgtggtggtggacgtgagccacgaagaccccgaggtccagttcaactggtacgtggacggcgtggaggtgcataatgccaagacaaagccacgggaggagcagttcaacagcacgttccgtgtggtcagcgtcctcaccgttgtgcaccaggactggctgaacggcaaggagtacaagtgcaaggtctccaacaaaggcctcccagcctccatcgagaaaaccatctccaaaaccaaagggcagccccgagaaccacaggtgtacaccctgcccccatcccgggaggagatgaccaagaaccaggtcagcctgacctgcctggtcaaaggcttctaccccagcgacatcgccgtggagtgggagagcaatgggcagccggagaacaactacaagaccacacctcccatgctggactccgacggctccttcttcctctacagcaagctcaccgtggacaagagcaggtggcagcaggggaacgtcttctcatgctccgtgatgcatgaggctctgcacaaccactacacgcagaagagcctctccctgtctccgggtaaatga

SEQ ID NO: 95 - protein, 606 aa, Homo sapiens
MEFGLSWVFLVAILKGVQCEVQLVESGGGLVKPGGSLRLSCGGSGFTFNNAWMNWVRQAPGKGLEWVGRIKGKTDGGTADYAAPVKGRFTISRDYSKNTLYLQMNSLTTEDTAVYYCNTDLPYYYGSGRYSGMDVWGQGTTVTVSSASTKGPQVQLQQSGPGLVKPSQTLSLTCAISGDSVSSNSATWNWIRQSPSRDLEWLGRTYYRSKWYRDYVGSVKSRIIINPDTSNNQFSLQLNSVTPEDTAIYYCTRAQWLGGDYPYYYSMDVWGQGTTVTVSSASTKGPSVFPLAPCSRSTSESTAALGCLVKDYFPEPVTVSWNSGALTSGVHTFPAVLQSSGLYSLSSVVTVPSSNFGTQTYTCNVDHKPSNTKVDKTVERKCCVECPPCPAPPVAGPSVFLFPPKPKDTLMISRTPEVTCVVVDVSHEDPEVQFNWYVDGVEVHNAKTKPREEQFNSTFRVVSVLTVVHQDWLNGKEYKCKVSNKGLPASIEKTISKTKGQPREPQVYTLPPSREEMTKNQVSLTCLVKGFYPSDIAVEWESNGQPENNYKTTPPMLDSDGSFFLYSKLTVDKSRWQQGNVFSCSVMHEALHNHYTQKSLSLSPGK

SEQ ID NO: 96 - DNA, 1026 bp, Homo sapiens
atggaagccccagctcagcttctcttcctcctgctactctggctcccagataccaccggagaaattgtgttgacacagtctccagccaccctgtctttgtctccaggggaaagagccaccctctcctgcagggccagtcagagtgttagcagctacttagcctggtaccaacagaaacctggccaggctcccaggctcctcatctatgatgcatccaacagggccactggcatcccagccaggttcagtggcagtgggtctgggacagacttcactctcaccatcagcagcctagagcctgaagattttgcagtttattactgtcagcagcgtagcaacactttcggccctgggaccaaagtggatatcaaacgtacggtggctgcaccagaaattgtgttgacacagtctccagccaccctgtctttgtctccaggggaaagagccaccctctcctgcagggccagtcagagtgttagcagctacttagcctggtaccaacagaaacctggccaggctcccaggctcctcatctatgatgcatccaacagggccactggcatcccagccaggttcagtggcagtgggtctgggacagacttcactctcaccatcagcagcctagagcctgaagattttgcagtttattactgtcagcagcgtagcaacactttcggccctgggaccaaagtggatatcaaacgtacggtggctgcaccatctgtcttcatcttcccgccatctgatgagcagttgaaatctggaactgcctctgttgtgtgcctgctgaataacttctatcccagagaggccaaagtacagtggaaggtggataacgccctccaatcgggtaactcccaggagagtgtcacagagcaggacagcaaggacagcacctacagcctcagcagcaccctgacgctgagcaaagcagactacgagaaacacaaagtctacgcctgcgaagtcacccatcagggcctgagctcgcccgtcacaaagagcttcaacaggggagagtgttga

SEQ ID NO: 97 - protein, 341 aa, Homo sapiens [sequence omitted]

SEQ ID NO: 98 - DNA, 984 bp, Artificial
  Synthetic linker of 341VL34-CH1-H-CH2-CH3-341-CH1 or 341VL36-CH1-H-CH2-CH3-341-CH1
gctagcaccaagggcccatcggtcttccccctggcgccctgctccaggagcacctccgagagcacagcggccctgggctgcctggtcaaggactacttccccgaaccggtgacggtgtcgtggaactcaggcgctctgaccagcggcgtgcacaccttcccagctgtcctacagtcctcaggactctactccctcagcagcgtggtgaccgtgccctccagcaacttcggcacccagacctacacctgcaacgtagatcacaagcccagcaacaccaaggtggacaagacagttgagcgcaaatgttgtgtcgagtgcccaccgtgcccagcaccacctgtggcaggaccgtcagtcttcctcttccccccaaaacccaaggacaccctcatgatctcccggacccctgaggtcacgtgcgtggtggtggacgtgagccacgaagaccccgaggtccagttcaactggtacgtggacggcgtggaggtgcataatgccaagacaaagccacgggaggagcagttcaacagcacgttccgtgtggtcagcgtcctcaccgttgtgcaccaggactggctgaacggcaaggagtacaagtgcaaggtctccaacaaaggcctcccagcctccatcgagaaaaccatctccaaaaccaaagggcagccccgagaaccacaggtgtacaccctgcccccatcccgggaggagatgaccaagaaccaggtcagcctgacctgcctggtcaaaggcttctaccccagcgacatcgccgtggagtgggagagcaatgggcagccggagaacaactacaagaccacacctcccatgctggactccgacggctccttcttcctctacagcaagctcaccgtggacaagagcaggtggcagcaggggaacgtcttctcatgctccgtgatgcatgaggctctgcacaaccactacacgcagaagagcctctccctgtctccgggtaaaggatcc

SEQ ID NO: 99 - protein, 328 aa, Artificial
  Synthetic linker of 341VL34-CH1-H-CH2-CH3-341-CH1 or 341VL36-CH1-H-CH2-CH3-341-CH1
ASTKGPSVFPLAPCSRSTSESTAALGCLVKDYFPEPVTVSWNSGALTSGVHTFPAVLQSSGLYSLSSVVTVPSSNFGTQTYTCNVDHKPSNTKVDKTVERKCCVECPPCPAPPVAGPSVFLFPPKPKDTLMISRTPEVTCVVVDVSHEDPEVQFNWYVDGVEVHNAKTKPREEQFNSTFRVVSVLTVVHQDWLNGKEYKCKVSNKGLPASIEKTISKTKGQPREPQVYTLPPSREEMTKNQVSLTCLVKGFYPSDIAVEWESNGQPENNYKTTPPMLDSDGSFFLYSKLTVDKSRWQQGNVFSCSVMHEALHNHYTQKSLSLSPGKGS

SEQ ID NO: 100 - DNA, 27 bp, Artificial
  primer
gtctcctcagctagcaccaagggccca

SEQ ID NO: 101 - DNA, 30 bp, Artificial
  primer
gggggatcctttacccggagacagggagag

SEQ ID NO: 102 - DNA, 35 bp, Artificial
  primer
gatatcaaaggatcccaggtccaactgcagcagtc

SEQ ID NO: 103 - DNA, 32 bp, Artificial
  primer
gggggatcctcaaactgtcttgtccaccttgg

SEQ ID NO: 104 - DNA, 2103 bp, Artificial
  Synthetic construct of 341VL34-CH1-H-CH2-CH3-341-CH1 H chain
atggagtttgggctgagctgggttttccttgttgctattttaaaaggtgtccagtgtgaggtgcagctggtggagtctgggggaggcttggtaaagcctggggggtcccttagactctcctgtggaggctctggattcactttcaataatgcctggatgaactgggtccgccaggctccagggaaggggctggagtgggttggccgcattaaaggcaagactgatggtgggacagcagactacgctgcacccgtgaaaggcagattcaccatctcaagagattattcaaaaaacacgctgtatctgcaaatgaacagcctgacaaccgaggacacagccgtgtattactgtaacacagatctcccgtattactatggttcggggcgttattcgggtatggacgtctggggccaagggaccacggtcaccgtctcctcagctagcaccaagggcccatcggtcttccccctggcgccctgctccaggagcacctccgagagcacagcggccctgggctgcctggtcaaggactacttccccgaaccggtgacggtgtcgtggaactcaggcgctctgaccagcggcgtgcacaccttcccagctgtcctacagtcctcaggactctactccctcagcagcgtggtgaccgtgccctccagcaacttcggcacccagacctacacctgcaacgtagatcacaagcccagcaacaccaaggtggacaagacagttgagcgcaaatgttgtgtcgagtgcccaccgtgcccagcaccacctgtggcaggaccgtcagtcttcctcttccccccaaaacccaaggacaccctcatgatctcccggacccctgaggtcacgtgcgtggtggtggacgtgagccacgaagaccccgaggtccagttcaactggtacgtggacggcgtggaggtgcataatgccaagacaaagccacgggaggagcagttcaacagcacgttccgtgtggtcagcgtcctcaccgttgtgcaccaggactggctgaacggcaaggagtacaagtgcaaggtctccaacaaaggcctcccagcctccatcgagaaaaccatctccaaaaccaaagggcagccccgagaaccacaggtgtacaccctgcccccatcccgggaggagatgaccaagaaccaggtcagcctgacctgcctggtcaaaggcttctaccccagcgacatcgccgtggagtgggagagcaatgggcagccggagaacaactacaagaccacacctcccatgctggactccgacggctccttcttcctctacagcaagctcaccgtggacaagagcaggtggcagcaggggaacgtcttctcatgctccgtgatgcatgaggctctgcacaaccactacacgcagaagagcctctccctgtctccgggtaaaggatcccaggtccaactgcagcagtcaggtccaggactggtgaagccctcgcagaccctctcactcacctgtgccatctccggggacagtgtctctagcaacagtgctacttggaactggatcaggcagtccccatcgagagaccttgagtggctgggaaggacatactacaggtccaagtggtatcgtgattatgtaggatctgtgaaaagtcgaataatcatcaacccagacacatccaacaaccagttctccctgcagctgaactctgtgactcccgaggacacggctatatattactgtacaagagcacagtggctgggaggggattacccctactactacagtatggacgtctggggccaagggaccacggtcaccgtctcctcagctagcaccaagggcccatcggtcttccccctggcgccctgctccaggagcacctccgagagcacagcggccctgggctgcctggtcaaggactacttccccgaaccggtgacggtgtcgtggaactcaggcgctctgaccagcggcgtgcacaccttcccagctgtcctacagtcctcaggactctactccctcagcagcgtggtgaccgtgccctccagcaacttcggcacccagacctacacctgcaacgtagatcacaagcccagcaacaccaaggtggacaagacagtttga

SEQ ID NO: 105 - protein, 700 aa, Artificial
  Synthetic construct of 341VL34-CH1-H-CH2-CH3-341-CH1 H chain
MEFGLSWVFLVAILKGVQCEVQLVESGGGLVKPGGSLRLSCGGSGFTFNNAWMNWVRQAPGKGLEWVGRIKGKTDGGTADYAAPVKGRFTISRDYSKNTLYLQMNSLTTEDTAVYYCNTDLPYYYGSGRYSGMDVWGQGTTVTVSSASTKGPSVFPLAPCSRSTSESTAALGCLVKDYFPEPVTVSWNSGALTSGVHTFPAVLQSSGLYSLSSVVTVPSSNFGTQTYTCNVDHKPSNTKVDKTVERKCCVECPPCPAPPVAGPSVFLFPPKPKDTLMISRTPEVTCVVVDVSHEDPEVQFNWYVDGVEVHNAKTKPREEQFNSTFRVVSVLTVVHQDWLNGKEYKCKVSNKGLPASIEKTISKTKGQPREPQVYTLPPSREEMTKNQVSLTCLVKGFYPSDIAVEWESNGQPENNYKTTPPMLDSDGSFFLYSKLTVDKSRWQQGNVFSCSVMHEALHNHYTQKSLSLSPGKGSQVQLQQSGPGLVKPSQTLSLTCAISGDSVSSNSATWNWIRQSPSRDLEWLGRTYYRSKWYRDYVGSVKSRIIINPDTSNNQFSLQLNSVTPEDTAIYYCTRAQWLGGDYPYYYSMDVWGQGTTVTVSSASTKGPSVFPLAPCSRSTSESTAALGCLVKDYFPEPVTVSWNSGALTSGVHTFPAVLQSSGLYSLSSVVTVPSSNFGTQTYTCNVDHKPSNTKVDKTV

SEQ ID NO: 106 - DNA, 2103 bp, Artificial
  Synthetic construct
atggagtttgggctgagctgggttttccttgttgctattttaaaaggtgtccagtgtgaggtgcagctggtggagtctgggggaggcttggtaaagcctggggggtcccttagactctcctgtggaggctctggattcactttcaataatgcctggatgaactgggtccgccaggctccagggaaggggctggagtgggttggccgcattaaaggcaagactgatggtgggacagcagactacgctgcacccgtgaaaggcagattcaccatctcaagagattattcaaaaaacacgctgtatctgcaaatgaacagcctaaaaaccgaggacacaggcgtgtattactgtaccacatatctcccgtattactatggttcggagagatggtcgggaatggacgtctggggccaagggaccacggtcaccgtctcctcagctagcaccaagggcccatcggtcttccccctggcgccctgctccaggagcacctccgagagcacagcggccctgggctgcctggtcaaggactacttccccgaaccggtgacggtgtcgtggaactcaggcgctctgaccagcggcgtgcacaccttcccagctgtcctacagtcctcaggactctactccctcagcagcgtggtgaccgtgccctccagcaacttcggcacccagacctacacctgcaacgtagatcacaagcccagcaacaccaaggtggacaagacagttggatcccaggtccaactgcagcagtcaggtccaggactggtgaagccctcgcagaccctctcactcacctgtgccatctccggggacagtgtctctagcaacagtgctacttggaactggatcaggcagtccccatcgagagaccttgagtggctgggaaggacatactacaggtccaagtggtatcgtgattatgtaggatctgtgaaaagtcgaataatcatcaacccagacacatccaacaaccagttctccctgcagctgaactctgtgactcccgaggacacggctatatattactgtacaagagcacagtggctgggaggggattacccctactactacagtatggacgtctggggccaagggaccacggtcaccgtctcctcagctagcaccaagggcccatcggtcttccccctggcgccctgctccaggagcacctccgagagcacagcggccctgggctgcctggtcaaggactacttccccgaaccggtgacggtgtcgtggaactcaggcgctctgaccagcggcgtgcacaccttcccagctgtcctacagtcctcaggactctactccctcagcagcgtggtgaccgtgccctccagcaacttcggcacccagacctacacctgcaacgtagatcacaagcccagcaacaccaaggtggacaagacagttgagcgcaaatgttgtgtcgagtgcccaccgtgcccagcaccacctgtggcaggaccgtcagtcttcctcttccccccaaaacccaaggacaccctcatgatctcccggacccctgaggtcacgtgcgtggtggtggacgtgagccacgaagaccccgaggtccagttcaactggtacgtggacggcgtggaggtgcataatgccaagacaaagccacgggaggagcagttcaacagcacgttccgtgtggtcagcgtcctcaccgttgtgcaccaggactggctgaacggcaaggagtacaagtgcaaggtctccaacaaaggcctcccagcctccatcgagaaaaccatctccaaaaccaaagggcagccccgagaaccacaggtgtacaccctgcccccatcccgggaggagatgaccaagaaccaggtcagcctgacctgcctggtcaaaggcttctaccccagcgacatcgccgtggagtgggagagcaatgggcagccggagaacaactacaagaccacacctcccatgctggactccgacggctccttcttcctctacagcaagctcaccgtggacaagagcaggtggcagcaggggaacgtcttctcatgctccgtgatgcatgaggctctgcacaaccactacacgcagaagagcctctccctgtctccgggtaaatga

SEQ ID NO: 107 - protein, 700 aa, Artificial
  Synthetic construct
MEFGLSWVFLVAILKGVQCEVQLVESGGGLVKPGGSLRLSCGGSGFTFNNAWMNWVRQAPGKGLEWVGRIKGKTDGGTADYAAPVKGRFTISRDYSKNTLYLQMNSLKTEDTGVYYCTTYLPYYYGSERWSGMDVWGQGTTVTVSSASTKGPSVFPLAPCSRSTSESTAALGCLVKDYFPEPVTVSWNSGALTSGVHTFPAVLQSSGLYSLSSVVTVPSSNFGTQTYTCNVDHKPSNTKVDKTVGSQVQLQQSGPGLVKPSQTLSLTCAISGDSVSSNSATWNWIRQSPSRDLEWLGRTYYRSKWYRDYVGSVKSRIIINPDTSNNQFSLQLNSVTPEDTAIYYCTRAQWLGGDYPYYYSMDVWGQGTTVTVSSASTKGPSVFPLAPCSRSTSESTAALGCLVKDYFPEPVTVSWNSGALTSGVHTFPAVLQSSGLYSLSSVVTVPSSNFGTQTYTCNVDHKPSNTKVDKTVERKCCVECPPCPAPPVAGPSVFLFPPKPKDTLMISRTPEVTCVVVDVSHEDPEVQFNWYVDGVEVHNAKTKPREEQFNSTFRVVSVLTVVHQDWLNGKEYKCKVSNKGLPASIEKTISKTKGQPREPQVYTLPPSREEMTKNQVSLTCLVKGFYPSDIAVEWESNGQPENNYKTTPPMLDSDGSFFLYSKLTVDKSRWQQGNVFSCSVMHEALHNHYTQKSLSLSPGK

SEQ ID NO: 108 - DNA, 2106 bp, Artificial
  Synthetic construct
atgtctgtctccttcctcatcttcctgcccgtgctgggcctcccatggggtgtcctgtcacaggtccaactgcagcagtcaggtccaggactggtgaagccctcgcagaccctctcactcacctgtgccatctccggggacagtgtctctagcaacagtgctacttggaactggatcaggcagtccccatcgagagaccttgagtggctgggaaggacatactacaggtccaagtggtatcgtgattatgtaggatctgtgaaaagtcgaataatcatcaacccagacacatccaacaaccagttctccctgcagctgaactctgtgactcccgaggacacggctatatattactgtacaagagcacagtggctgggaggggattacccctactactacagtatggacgtctggggccaagggaccacggtcaccgtctcctcagctagcaccaagggcccatcggtcttccccctggcgccctgctccaggagcacctccgagagcacagcggccctgggctgcctggtcaaggactacttccccgaaccggtgacggtgtcgtggaactcaggcgctctgaccagcggcgtgcacaccttcccagctgtcctacagtcctcaggactctactccctcagcagcgtggtgaccgtgccctccagcaacttcggcacccagacctacacctgcaacgtagatcacaagcccagcaacaccaaggtggacaagacagttggatccgaggtgcagctggtggagtctgggggaggcttggtaaagcctggggggtcccttagactctcctgtggaggctctggattcactttcaataatgcctggatgaactgggtccgccaggctccagggaaggggctggagtgggttggccgcattaaaggcaagactgatggtgggacagcagactacgctgcacccgtgaaaggcagattcaccatctcaagagattattcaaaaaacacgctgtatctgcaaatgaacagcctaaaaaccgaggacacaggcgtgtattactgtaccacatatctcccgtattactatggttcggagagatggtcgggaatggacgtctggggccaagggaccacggtcaccgtctcctcagctagcaccaagggcccatcggtcttccccctggcgccctgctccaggagcacctccgagagcacagcggccctgggctgcctggtcaaggactacttccccgaaccggtgacggtgtcgtggaactcaggcgctctgaccagcggcgtgcacaccttcccagctgtcctacagtcctcaggactctactccctcagcagcgtggtgaccgtgccctccagcaacttcggcacccagacctacacctgcaacgtagatcacaagcccagcaacaccaaggtggacaagacagttgagcgcaaatgttgtgtcgagtgcccaccgtgcccagcaccacctgtggcaggaccgtcagtcttcctcttccccccaaaacccaaggacaccctcatgatctcccggacccctgaggtcacgtgcgtggtggtggacgtgagccacgaagaccccgaggtccagttcaactggtacgtggacggcgtggaggtgcataatgccaagacaaagccacgggaggagcagttcaacagcacgttccgtgtggtcagcgtcctcaccgttgtgcaccaggactggctgaacggcaaggagtacaagtgcaaggtctccaacaaaggcctcccagcctccatcgagaaaaccatctccaaaaccaaagggcagccccgagaaccacaggtgtacaccctgcccccatcccgggaggagatgaccaagaaccaggtcagcctgacctgcctggtcaaaggcttctaccccagcgacatcgccgtggagtgggagagcaatgggcagccggagaacaactacaagaccacacctcccatgctggactccgacggctccttcttcctctacagcaagctcaccgtggacaagagcaggtggcagcaggggaacgtcttctcatgctccgtgatgcatgaggctctgcacaaccactacacgcagaagagcctctccctgtctccgggtaaatga

SEQ ID NO: 109 - protein, 701 aa, Artificial [sequence omitted]

SEQ ID NO: 110 - DNA, 1821 bp, Homo sapiens
atggagtttgggctgagctgggttttccttgttgctattttaaaaggtgtccagtgtgaggtgcagctggtggagtctgggggaggcttggtaaagcctggggggtcccttagactctcctgtggaggctctggattcactttcaataatgcctggatgaactgggtccgccaggctccagggaaggggctggagtgggttggccgcattaaaggcaagactgatggtgggacagcagactacgctgcacccgtgaaaggcagattcaccatctcaagagattattcaaaaaacacgctgtatctgcaaatgaacagcctaaaaaccgaggacacaggcgtgtattactgtaccacatatctcccgtattactatggttcggagagatggtcgggaatggacgtctggggccaagggaccacggtcaccgtctcctcagctagcaccaagggcccacaggtccaactgcagcagtcaggtccaggactggtgaagccctcgcagaccctctcactcacctgtgccatctccggggacagtgtctctagcaacagtgctacttggaactggatcaggcagtccccatcgagagaccttgagtggctgggaaggacatactacaggtccaagtggtatcgtgattatgtaggatctgtgaaaagtcgaataatcatcaacccagacacatccaacaaccagttctccctgcagctgaactctgtgactcccgaggacacggctatatattactgtacaagagcacagtggctgggaggggattacccctactactacagtatggacgtctggggccaagggaccacggtcaccgtctcctcagctagcaccaagggcccatcggtcttccccctggcgccctgctccaggagcacctccgagagcacagcggccctgggctgcctggtcaaggactacttccccgaaccggtgacggtgtcgtggaactcaggcgctctgaccagcggcgtgcacaccttcccagctgtcctacagtcctcaggactctactccctcagcagcgtggtgaccgtgccctccagcaacttcggcacccagacctacacctgcaacgtagatcacaagcccagcaacaccaaggtggacaagacagttgagcgcaaatgttgtgtcgagtgcccaccgtgcccagcaccacctgtggcaggaccgtcagtcttcctcttccccccaaaacccaaggacaccctcatgatctcccggacccctgaggtcacgtgcgtggtggtggacgtgagccacgaagaccccgaggtccagttcaactggtacgtggacggcgtggaggtgcataatgccaagacaaagccacgggaggagcagttcaacagcacgttccgtgtggtcagcgtcctcaccgttgtgcaccaggactggctgaacggcaaggagtacaagtgcaaggtctccaacaaaggcctcccagcctccatcgagaaaaccatctccaaaaccaaagggcagccccgagaaccacaggtgtacaccctgcccccatcccgggaggagatgaccaagaaccaggtcagcctgacctgcctggtcaaaggcttctaccccagcgacatcgccgtggagtgggagagcaatgggcagccggagaacaactacaagaccacacctcccatgctggactccgacggctccttcttcctctacagcaagctcaccgtggacaagagcaggtggcagcaggggaacgtcttctcatgctccgtgatgcatgaggctctgcacaaccactacacgcagaagagcctctccctgtctccgggtaaatga

SEQ ID NO: 111 - protein, 606 aa, Homo sapiens
MEFGLSWVFLVAILKGVQCEVQLVESGGGLVKPGGSLRLSCGGSGFTFNNAWMNWVRQAPGKGLEWVGRIKGKTDGGTADYAAPVKGRFTISRDYSKNTLYLQMNSLKTEDTGVYYCTTYLPYYYGSERWSGMDVWGQGTTVTVSSASTKGPQVQLQQSGPGLVKPSQTLSLTCAISGDSVSSNSATWNWIRQSPSRDLEWLGRTYYRSKWYRDYVGSVKSRIIINPDTSNNQFSLQLNSVTPEDTAIYYCTRAQWLGGDYPYYYSMDVWGQGTTVTVSSASTKGPSVFPLAPCSRSTSESTAALGCLVKDYFPEPVTVSWNSGALTSGVHTFPAVLQSSGLYSLSSVVTVPSSNFGTQTYTCNVDHKPSNTKVDKTVERKCCVECPPCPAPPVAGPSVFLFPPKPKDTLMISRTPEVTCVVVDVSHEDPEVQFNWYVDGVEVHNAKTKPREEQFNSTFRVVSVLTVVHQDWLNGKEYKCKVSNKGLPASIEKTISKTKGQPREPQVYTLPPSREEMTKNQVSLTCLVKGFYPSDIAVEWESNGQPENNYKTTPPMLDSDGSFFLYSKLTVDKSRWQQGNVFSCSVMHEALHNHYTQKSLSLSPGK

SEQ ID NO: 112 - DNA, 1026 bp, Homo sapiens; identical to SEQ ID NO: 96

SEQ ID NO: 113 - protein, 341 aa, Homo sapiens [sequence omitted]

SEQ ID NO: 114 - DNA, 2103 bp, Artificial
  Synthetic construct of 341VL36-CH1-H- CH2-CH3-341-CH1 H chain
atggagtttgggctgagctgggttttccttgttgctattttaaaaggtgtccagtgtgaggtgcagctggtggagtctgggggaggcttggtaaagcctggggggtcccttagactctcctgtggaggctctggattcactttcaataatgcctggatgaactgggtccgccaggctccagggaaggggctggagtgggttggccgcattaaaggcaagactgatggtgggacagcagactacgctgcacccgtgaaaggcagattcaccatctcaagagattattcaaaaaacacgctgtatctgcaaatgaacagcctaaaaaccgaggacacaggcgtgtattactgtaccacatatctcccgtattactatggttcggagagatggtcgggaatggacgtctggggccaagggaccacggtcaccgtctcctcagctagcaccaagggcccatcggtcttccccctggcgccctgctccaggagcacctccgagagcacagcggccctgggctgcctggtcaaggactacttccccgaaccggtgacggtgtcgtggaactcaggcgctctgaccagcggcgtgcacaccttcccagctgtcctacagtcctcaggactctactccctcagcagcgtggtgaccgtgccctccagcaacttcggcacccagacctacacctgcaacgtagatcacaagcccagcaacaccaaggtggacaagacagttgagcgcaaatgttgtgtcgagtgcccaccgtgcccagcaccacctgtggcaggaccgtcagtcttcctcttccccccaaaacccaaggacaccctcatgatctcccggacccctgaggtcacgtgcgtggtggtggacgtgagccacgaagaccccgaggtccagttcaactggtacgtggacggcgtggaggtgcataatgccaagacaaagccacgggaggagcagttcaacagcacgttccgtgtggtcagcgtcctcaccgttgtgcaccaggactggctgaacggcaaggagtacaagtgcaaggtctccaacaaaggcctcccagcctccatcgagaaaaccatctccaaaaccaaagggcagccccgagaaccacaggtgtacaccctgcccccatcccgggaggagatgaccaagaaccaggtcagcctgacctgcctggtcaaaggcttctaccccagcgacatcgccgtggagtgggagagcaatgggcagccggagaacaactacaagaccacacctcccatgctggactccgacggctccttcttcctctacagcaagctcaccgtggacaagagcaggtggcagcaggggaacgtcttctcatgctccgtgatgcatgaggctctgcacaaccactacacgcagaagagcctctccctgtctccgggtaaaggatcccaggtccaactgcagcagtcaggtccaggactggtgaagccctcgcagaccctctcactcacctgtgccatctccggggacagtgtctctagcaacagtgctacttggaactggatcaggcagtccccatcgagagaccttgagtggctgggaaggacatactacaggtccaagtggtatcgtgattatgtaggatctgtgaaaagtcgaataatcatcaacccagacacatccaacaaccagttctccctgcagctgaactctgtgactcccgaggacacggctatatattactgtacaagagcacagtggctgggaggggattacccctactactacagtatggacgtctggggccaagggaccacggtcaccgtctcctcagctagcaccaagggcccatcggtcttccccctggcgccctgctccaggagcacctccgagagcacagcggccctgggctgcctggtcaaggactacttccccgaaccggtgacggtgtcgtggaactcaggcgctctgaccagcggcgtgcacaccttcccagctgtcctacagtcctcaggactctactccctcagcagcgtggtgaccgtgccctccagcaacttcggcacccagacctacacctgcaacgtagatcacaagcccagcaacaccaaggtggacaagacagtttga

SEQ ID NO: 115 - protein, 700 aa, Artificial [sequence omitted]

SEQ ID NO: 116 - DNA, 481 bp, Mus musculus
ctgaacacagacccgtcgactttgagagtcctggacctcctgtgcaagaacatgaaacatctgtggttcttccttctcctggtggcagctcccagatgggtcctgtcccaggtgcagctgcaggagtcgggcccaggactggtgaagccttcggagaccctgtccctcacctgcactgtctctggtggctccatcagtggttactactggagctggatccggcagcccccagggaagggactggagtggattgggtatatctattacagtgggagcaccaactacaatccctccctcaagagtcgagtcaccatatcagtagacacgtccaagaaccagttctccctgaagctgaattctgtgaccgctgcggacacggccgtgtattactgtgcgagagcccccttgcacggtgactacaaatggttccacccctggggccagggaaccctggtcaccgtctcctcagctagcaccaagg

SEQ ID NO: 117 - protein, 143 aa, Mus musculus
MKHLWFFLLLVAAPRWVLSQVQLQESGPGLVKPSETLSLTCTVSGGSISGYYWSWIRQPPGKGLEWIGYIYYSGSTNYNPSLKSRVTISVDTSKNQFSLKLNSVTAADTAVYYCARAPLHGDYKWFHPWGQGTLVTVSSASTK

SEQ ID NO: 118 - DNA, 430 bp, Mus musculus
tcacagatctgagctgctcagttaggacccagagggaaccatggaaaccccagcgcagcttctcttcctcctgctactctggctcccagataccaccggagaaattgtgttgacgcagtctccaggcaccctgtctttgtctccaggggaaagagccaccctctcctgcagggccagtcagagtgttagcagcagctacttagcctggtaccagcagaaacctggccaggctcccaggctcctcatctatggtgcatccagcagggccactggcatcccagacaggttcagtggcagtgggtctgggacagacttcactctcaccatcagcagactggagcctgaagattttgcagtgtattactgtcagcagtatggtagctcaccgatcaccttcggccaagggacacgactggagatcaaacgtacg

SEQ ID NO: 119 - protein, 130 aa, Mus musculus
METPAQLLFLLLLWLPDTTGEIVLTQSPGTLSLSPGERATLSCRASQSVSSSYLAWYQQKPGQAPRLLIYGASSRATGIPDRFSGSGSGTDFTLTISRLEPEDFAVYYCQQYGSSPITFGQGTRLEIKRT

SEQ ID NO: 120 - DNA, 45 bp, Artificial; identical to SEQ ID NO: 5
  primer

SEQ ID NO: 121 - DNA, 49 bp, Artificial
  primer
ccgaggcgcgcccaccgctgccaccgcctcctgaggagacggtgaccag

SEQ ID NO: 122 - DNA, 49 bp, Artificial
  primer
cggtgggcgcgcctcgggcggaggtggttcagaaattgtgttgacgcag

SEQ ID NO: 123 - DNA, 48 bp, Artificial
  primer
gagtcattctcgacttgcggccgcacgtttgatctccagtcgtgtccc

SEQ ID NO: 124 - DNA, 56 bp, Artificial
  primer
gtcctcgcaactgcggcccagccggccatggcccagrtgcagctggtgcartctgg

SEQ ID NO: 125 - DNA, 56 bp, Artificial
  primer
gtcctcgcaactgcggcccagccggccatggccsaggtccagctggtrcagtctgg

SEQ ID NO: 126 - DNA, 56 bp, Artificial
  primer
gtcctcgcaactgcggcccagccggccatggcccagrtcaccttgaaggagtctgg

SEQ ID NO: 127 - DNA, 56 bp, Artificial
  primer
gtcctcgcaactgcggcccagccggccatggccsaggtgcagctggtggagtctgg

SEQ ID NO: 128 - DNA, 56 bp, Artificial
  primer
gtcctcgcaactgcggcccagccggccatggcccaggtgcagctacagcagtgggg

SEQ ID NO: 129 - DNA, 56 bp, Artificial
  primer
gtcctcgcaactgcggcccagccggccatggcccagstgcagctgcaggagtcsgg

SEQ ID NO: 130 - DNA, 56 bp, Artificial
  primer
gtcctcgcaactgcggcccagccggccatggccgargtgcagctggtgcagtctgg

SEQ ID NO: 131 - DNA, 56 bp, Artificial
  primer
gtcctcgcaactgcggcccagccggccatggcccaggtacagctgcagcagtcagg

SEQ ID NO: 132 - DNA, 65 bp, Artificial
  primer
cccgaggcgcgcccaccgctgccaccgcctcctgaggagacggtgaccagggtgccyykgcccca

SEQ ID NO: 133 - DNA, 65 bp, Artificial
  primer
cccgaggcgcgcccaccgctgccaccgcctcctgaggagacggtgaccattgtcccyykgcccca

SEQ ID NO: 134 - DNA, 65 bp, Artificial
  primer
cccgaggcgcgcccaccgctgccaccgcctcctgaggagacggtgaccagggttccyykgcccca

SEQ ID NO: 135 - DNA, 65 bp, Artificial
  primer
cccgaggcgcgcccaccgctgccaccgcctcctgaggagacggtgaccgtggtcccyykccccca

SEQ ID NO: 136 - DNA, 48 bp, Artificial
  primer
ctgctggtggcggctcccagatgggtcctgtccgaggtccagctggtg

SEQ ID NO: 137 - DNA, 17 bp, Artificial
  primer
tgaggagacggtgacca

SEQ ID NO: 138 - DNA, 49 bp, Artificial
  primer
ggggtcgacaccatgaagcacctgtggttcttcctcctgctggtggcgg

SEQ ID NO: 139 - DNA, 26 bp, Artificial
  primer
ggggctagctgaggagacggtgacca

SEQ ID NO: 140 - DNA, 1419 bp, Artificial
  Synthetic construct of 281VL4
atgaagcacctgtggttcttcctcctgctggtggcggctcccagatgggtcctgtccgaggtccagctggtgcagtctgggtctgagctgaagaagcctgggtcctcggtgaaggtctcctgcaaggcttctggaggcacctccaggagctttgctatcagctgggtgcgacaggcccctggacaaggacttgagtggatgggagggatcatccctatctttggtccagcaaactacgcacagaagttccagggcagagtcacgattaccgcggacgaatccacgagcacagcctacatggagctgagtagcctgagatctgaggacacggccgtgtattactgtgcgaggcacgctattgctatgggttggggagttattacaacgaactactttgactcctggggccaagggacaatggtcaccgtctcctcagctagcaccaaggggccatccgtcttccccctggcgccctgctccaggagcacctccgagagcacagccgccctgggctgcctggtcaaggactacttccccgaaccggtgacggtgtcgtggaactcaggcgccctgaccagcggcgtgcacaccttcccggctgtcctacagtcctcaggactctactccctcagcagcgtggtgaccgtgccctccagcagcttgggcacgaagacctacacctgcaacgtagatcacaagcccagcaacaccaaggtggacaagagagttgagtccaaatatggtcccccatgcccaccatgcccagcacctgagttcgaggggggaccatcagtcttcctgttccccccaaaacccaaggacactctcatgatctcccggacccctgaggtcacgtgcgtggtggtggacgtgagccaggaagaccccgaggtccagttcaactggtacgtggatggcgtggaggtgcataatgccaagacaaagccgcgggaggagcagttcaacagcacgtaccgtgtggtcagcgtcctcaccgtcctgcaccaggactggctgaacggcaaggagtacaagtgcaaggtctccaacaaaggcctcccgtcctccatcgagaaaaccatctccaaagccaaagggcagccccgagagccacaggtgtacaccctgcccccatcccaggaggagatgaccaagaaccaggtcagcctgacctgcctggtcaaaggcttctaccccagcgacatcgccgtggagtgggagagcaatgggcagccggagaacaactacaagaccacgcctcccgtgctggactccgacggctccttcttcctctacagcaggctaaccgtggacaagagcaggtggcaggaggggaatgtcttctcatgctccgtgatgcatgaggctctgcacaaccactacacacagaagagcctctccctgtctctgggtaaatga

SEQ ID NO: 141 - protein, 472 aa, Artificial [sequence omitted]

SEQ ID NO: 142 - DNA, 300 bp, Artificial
  Synthetic construct of 281VL4-CH1-281
gctagcaccaaggggccatccgtcttccccctggcgccctgctccaggagcacctccgagagcacagccgccctgggctgcctggtcaaggactacttccccgaaccggtgacggtgtcgtggaactcaggcgccctgaccagcggcgtgcacaccttcccggctgtcctacagtcctcaggactctactccctcagcagcgtggtgaccgtgccctccagcagcttgggcacgaagacctacacctgcaacgtagatcacaagcccagcaacaccaaggtggacaagagagttggatcc

SEQ ID NO: 143 - protein, 100 aa, Artificial
  Synthetic construct of 281VL4-CH1-281
ASTKGPSVFPLAPCSRSTSESTAALGCLVKDYFPEPVTVSWNSGALTSGVHTFPAVLQSSGLYSLSSVVTVPSSSLGTKTYTCNVDHKPSNTKVDKRVGS

SEQ ID NO: 144 - DNA, 21 bp, Artificial
  primer
ggggctagcaccaaggggcca

SEQ ID NO: 145 - DNA, 24 bp, Artificial
  primer
ggatccaactctcttgtccacctt

SEQ ID NO: 146 - DNA, 30 bp, Artificial
  primer
aagagagttggatcccaggtgcagctgcag

SEQ ID NO: 147 - DNA, 26 bp, Artificial
  primer
ggggctagctgaggagacggtgacca

SEQ ID NO: 148 - DNA, 2079 bp, Artificial
  Synthetic construct of 281VL4-CH1-281
atgaagcacctgtggttcttcctcctgctggtggcggctcccagatgggtcctgtccgaggtccagctggtgcagtctgggtctgagctgaagaagcctgggtcctcggtgaaggtctcctgcaaggcttctggaggcacctccaggagctttgctatcagctgggtgcgacaggcccctggacaaggacttgagtggatgggagggatcatccctatctttggtccagcaaactacgcacagaagttccagggcagagtcacgattaccgcggacgaatccacgagcacagcctacatggagctgagtagcctgagatctgaggacacggccgtgtattactgtgcgaggcacgctattgctatgggttggggagttattacaacgaactactttgactcctggggccaagggacaatggtcaccgtctcctcagctagcaccaaggggccatccgtcttccccctggcgccctgctccaggagcacctccgagagcacagccgccctgggctgcctggtcaaggactacttccccgaaccggtgacggtgtcgtggaactcaggcgccctgaccagcggcgtgcacaccttcccggctgtcctacagtcctcaggactctactccctcagcagcgtggtgaccgtgccctccagcagcttgggcacgaagacctacacctgcaacgtagatcacaagcccagcaacaccaaggtggacaagagagttggatcccaggtgcagctgcaggagtcgggcccaggactggtgaagccttcggagaccctgtccctcacctgcactgtctctggtggctccatcagtggttactactggagctggatccggcagcccccagggaagggactggagtggattgggtatatctattacagtgggagcaccaactacaatccctccctcaagagtcgagtcaccatatcagtagacacgtccaagaaccagttctccctgaagctgaattctgtgaccgctgcggacacggccgtgtattactgtgcgagagcccccttgcacggtgactacaaatggttccacccctggggccagggaaccctggtcaccgtctcctcagctagcaccaaggggccatccgtcttccccctggcgccctgctccaggagcacctccgagagcacagccgccctgggctgcctggtcaaggactacttccccgaaccggtgacggtgtcgtggaactcaggcgccctgaccagcggcgtgcacaccttcccggctgtcctacagtcctcaggactctactccctcagcagcgtggtgaccgtgccctccagcagcttgggcacgaagacctacacctgcaacgtagatcacaagcccagcaacaccaaggtggacaagagagttgagtccaaatatggtcccccatgcccaccatgcccagcacctgagttcgaggggggaccatcagtcttcctgttccccccaaaacccaaggacactctcatgatctcccggacccctgaggtcacgtgcgtggtggtggacgtgagccaggaagaccccgaggtccagttcaactggtacgtggatggcgtggaggtgcataatgccaagacaaagccgcgggaggagcagttcaacagcacgtaccgtgtggtcagcgtcctcaccgtcctgcaccaggactggctgaacggcaaggagtacaagtgcaaggtctccaacaaaggcctcccgtcctccatcgagaaaaccatctccaaagccaaagggcagccccgagagccacaggtgtacaccctgcccccatcccaggaggagatgaccaagaaccaggtcagcctgacctgcctggtcaaaggcttctaccccagcgacatcgccgtggagtgggagagcaatgggcagccggagaacaactacaagaccacgcctcccgtgctggactccgacggctccttcttcctctacagcaggctaaccgtggacaagagcaggtggcaggaggggaatgtcttctcatgctccgtgatgcatgaggctctgcacaaccactacacacagaagagcctctccctgtctctgggtaaatga

SEQ ID NO: 149 - protein, 692 aa, Artificial [sequence omitted]

SEQ ID NO: 150 - DNA, 41 bp, Artificial
  primer
gtcttccccctggcgccctgccaggtgcagctgcaggagtc

SEQ ID NO: 151 - DNA, 42 bp, Artificial
  primer
ggggctagcaccaaggggccatccgtcttccccctggcgccc

SEQ ID NO: 152 - DNA, 1821 bp, Artificial
  Synthetic construct of 281VL4-CH1(118-131)-281
atgaagcacctgtggttcttcctcctgctggtggcggctcccagatgggtcctgtccgaggtccagctggtgcagtctgggtctgagctgaagaagcctgggtcctcggtgaaggtctcctgcaaggcttctggaggcacctccaggagctttgctatcagctgggtgcgacaggcccctggacaaggacttgagtggatgggagggatcatccctatctttggtccagcaaactacgcacagaagttccagggcagagtcacgattaccgcggacgaatccacgagcacagcctacatggagctgagtagcctgagatctgaggacacggccgtgtattactgtgcgaggcacgctattgctatgggttggggagttattacaacgaactactttgactcctggggccaagggacaatggtcaccgtctcctcagctagcaccaaggggccatccgtcttccccctggcgccctgccaggtgcagctgcaggagtcgggcccaggactggtgaagccttcggagaccctgtccctcacctgcactgtctctggtggctccatcagtggttactactggagctggatccggcagcccccagggaagggactggagtggattgggtatatctattacagtgggagcaccaactacaatccctccctcaagagtcgagtcaccatatcagtagacacgtccaagaaccagttctccctgaagctgaattctgtgaccgctgcggacacggccgtgtattactgtgcgagagcccccttgcacggtgactacaaatggttccacccctggggccagggaaccctggtcaccgtctcctcagctagcaccaaggggccatccgtcttccccctggcgccctgctccaggagcacctccgagagcacagccgccctgggctgcctggtcaaggactacttccccgaaccggtgacggtgtcgtggaactcaggcgccctgaccagcggcgtgcacaccttcccggctgtcctacagtcctcaggactctactccctcagcagcgtggtgaccgtgccctccagcagcttgggcacgaagacctacacctgcaacgtagatcacaagcccagcaacaccaaggtggacaagagagttgagtccaaatatggtcccccatgcccaccatgcccagcacctgagttcgaggggggaccatcagtcttcctgttccccccaaaacccaaggacactctcatgatctcccggacccctgaggtcacgtgcgtggtggtggacgtgagccaggaagaccccgaggtccagttcaactggtacgtggatggcgtggaggtgcataatgccaagacaaagccgcgggaggagcagttcaacagcacgtaccgtgtggtcagcgtcctcaccgtcctgcaccaggactggctgaacggcaaggagtacaagtgcaaggtctccaacaaaggcctcccgtcctccatcgagaaaaccatctccaaagccaaagggcagccccgagagccacaggtgtacaccctgcccccatcccaggaggagatgaccaagaaccaggtcagcctgacctgcctggtcaaaggcttctaccccagcgacatcgccgtggagtgggagagcaatgggcagccggagaacaactacaagaccacgcctcccgtgctggactccgacggctccttcttcctctacagcaggctaaccgtggacaagagcaggtggcaggaggggaatgtcttctcatgctccgtgatgcatgaggctctgcacaaccactacacacagaagagcctctccctgtctctgggtaaatga

SEQ ID NO: 153 - protein, 606 aa, Artificial
  Synthetic construct of 281VL4-CH1(118-131)-281
MKHLWFFLLLVAAPRWVLSEVQLVQSGSELKKPGSSVKVSCKASGGTSRSFAISWVRQAPGQGLEWMGGIIPIFGPANYAQKFQGRVTITADESTSTAYMELSSLRSEDTAVYYCARHAIAMGWGVITTNYFDSWGQGTMVTVSSASTKGPSVFPLAPCQVQLQESGPGLVKPSETLSLTCTVSGGSISGYYWSWIRQPPGKGLEWIGYIYYSGSTNYNPSLKSRVTISVDTSKNQFSLKLNSVTAADTAVYYCARAPLHGDYKWFHPWGQGTLVTVSSASTKGPSVFPLAPCSRSTSESTAALGCLVKDYFPEPVTVSWNSGALTSGVHTFPAVLQSSGLYSLSSVVTVPSSSLGTKTYTCNVDHKPSNTKVDKRVESKYGPPCPPCPAPEFEGGPSVFLFPPKPKDTLMISRTPEVTCVVVDVSQEDPEVQFNWYVDGVEVHNAKTKPREEQFNSTYRVVSVLTVLHQDWLNGKEYKCKVSNKGLPSSIEKTISKAKGQPREPQVYTLPPSQEEMTKNQVSLTCLVKGFYPSDIAVEWESNGQPENNYKTTPPVLDSDGSFFLYSRLTVDKSRWQEGNVFSCSVMHEALHNHYTQKSLSLSLGK

SEQ ID NO: 154 - DNA, 38 bp, Artificial
  primer
gtcttccccctggcgccccaggtgcagctgcaggagtc

SEQ ID NO: 155 - DNA, 1818 bp, Artificial
  Synthetic construct of 281VL4-CH1(118-130)-281
atgaagcacctgtggttcttcctcctgctggtggcggctcccagatgggtcctgtccgaggtccagctggtgcagtctgggtctgagctgaagaagcctgggtcctcggtgaaggtctcctgcaaggcttctggaggcacctccaggagctttgctatcagctgggtgcgacaggcccctggacaaggacttgagtggatgggagggatcatccctatctttggtccagcaaactacgcacagaagttccagggcagagtcacgattaccgcggacgaatccacgagcacagcctacatggagctgagtagcctgagatctgaggacacggccgtgtattactgtgcgaggcacgctattgctatgggttggggagttattacaacgaactactttgactcctggggccaagggacaatggtcaccgtctcctcagctagcaccaaggggccatccgtcttccccctggcgccccaggtgcagctgcaggagtcgggcccaggactggtgaagccttcggagaccctgtccctcacctgcactgtctctggtggctccatcagtggttactactggagctggatccggcagcccccagggaagggactggagtggattgggtatatctattacagtgggagcaccaactacaatccctccctcaagagtcgagtcaccatatcagtagacacgtccaagaaccagttctccctgaagctgaattctgtgaccgctgcggacacggccgtgtattactgtgcgagagcccccttgcacggtgactacaaatggttccacccctggggccagggaaccctggtcaccgtctcctcagctagcaccaaggggccatccgtcttccccctggcgccctgctccaggagcacctccgagagcacagccgccctgggctgcctggtcaaggactacttccccgaaccggtgacggtgtcgtggaactcaggcgccctgaccagcggcgtgcacaccttcccggctgtcctacagtcctcaggactctactccctcagcagcgtggtgaccgtgccctccagcagcttgggcacgaagacctacacctgcaacgtagatcacaagcccagcaacaccaaggtggacaagagagttgagtccaaatatggtcccccatgcccaccatgcccagcacctgagttcgaggggggaccatcagtcttcctgttccccccaaaacccaaggacactctcatgatctcccggacccctgaggtcacgtgcgtggtggtggacgtgagccaggaagaccccgaggtccagttcaactggtacgtggatggcgtggaggtgcataatgccaagacaaagccgcgggaggagcagttcaacagcacgtaccgtgtggtcagcgtcctcaccgtcctgcaccaggactggctgaacggcaaggagtacaagtgcaaggtctccaacaaaggcctcccgtcctccatcgagaaaaccatctccaaagccaaagggcagccccgagagccacaggtgtacaccctgcccccatcccaggaggagatgaccaagaaccaggtcagcctgacctgcctggtcaaaggcttctaccccagcgacatcgccgtggagtgggagagcaatgggcagccggagaacaactacaagaccacgcctcccgtgctggactccgacggctccttcttcctctacagcaggctaaccgtggacaagagcaggtggcaggaggggaatgtcttctcatgctccgtgatgcatgaggctctgcacaaccactacacacagaagagcctctccctgtctctgggtaaatga

SEQ ID NO: 156 - protein, 605 aa, Artificial
  Synthetic construct of 281VL4-CH1(118-130)-281
MKHLWFFLLLVAAPRWVLSEVQLVQSGSELKKPGSSVKVSCKASGGTSRSFAISWVRQAPGQGLEWMGGIIPIFGPANYAQKFQGRVTITADESTSTAYMELSSLRSEDTAVYYCARHAIAMGWGVITTNYFDSWGQGTMVTVSSASTKGPSVFPLAPQVQLQESGPGLVKPSETLSLTCTVSGGSISGYYWSWIRQPPGKGLEWIGYIYYSGSTNYNPSLKSRVTISVDTSKNQFSLKLNSVTAADTAVYYCARAPLHGDYKWFHPWGQGTLVTVSSASTKGPSVFPLAPCSRSTSESTAALGCLVKDYFPEPVTVSWNSGALTSGVHTFPAVLQSSGLYSLSSVVTVPSSSLGTKTYTCNVDHKPSNTKVDKRVESKYGPPCPPCPAPEFEGGPSVFLFPPKPKDTLMISRTPEVTCVVVDVSQEDPEVQFNWYVDGVEVHNAKTKPREEQFNSTYRVVSVLTVLHQDWLNGKEYKCKVSNKGLPSSIEKTISKAKGQPREPQVYTLPPSQEEMTKNQVSLTCLVKGFYPSDIAVEWESNGQPENNYKTTPPVLDSDGSFFLYSRLTVDKSRWQEGNVFSCSVMHEALHNHYTQKSLSLSLGK

SEQ ID NO: 157 - DNA, 1821 bp, Artificial
  Synthetic construct of 281VL4-CH1(118-131/C131S)-281
atgaagcacctgtggttcttcctcctgctggtggcggctcccagatgggtcctgtccgaggtccagctggtgcagtctgggtctgagctgaagaagcctgggtcctcggtgaaggtctcctgcaaggcttctggaggcacctccaggagctttgctatcagctgggtgcgacaggcccctggacaaggacttgagtggatgggagggatcatccctatctttggtccagcaaactacgcacagaagttccagggcagagtcacgattaccgcggacgaatccacgagcacagcctacatggagctgagtagcctgagatctgaggacacggccgtgtattactgtgcgaggcacgctattgctatgggttggggagttattacaacgaactactttgactcctggggccaagggacaatggtcaccgtctcctcagctagcaccaaggggccatccgtcttccccctggcgccctcccaggtgcagctgcaggagtcgggcccaggactggtgaagccttcggagaccctgtccctcacctgcactgtctctggtggctccatcagtggttactactggagctggatccggcagcccccagggaagggactggagtggattgggtatatctattacagtgggagcaccaactacaatccctccctcaagagtcgagtcaccatatcagtagacacgtccaagaaccagttctccctgaagctgaattctgtgaccgctgcggacacggccgtgtattactgtgcgagagcccccttgcacggtgactacaaatggttccacccctggggccagggaaccctggtcaccgtctcctcagctagcaccaaggggccatccgtcttccccctggcgccctgctccaggagcacctccgagagcacagccgccctgggctgcctggtcaaggactacttccccgaaccggtgacggtgtcgtggaactcaggcgccctgaccagcggcgtgcacaccttcccggctgtcctacagtcctcaggactctactccctcagcagcgtggtgaccgtgccctccagcagcttgggcacgaagacctacacctgcaacgtagatcacaagcccagcaacaccaaggtggacaagagagttgagtccaaatatggtcccccatgcccaccatgcccagcacctgagttcgaggggggaccatcagtcttcctgttccccccaaaacccaaggacactctcatgatctcccggacccctgaggtcacgtgcgtggtggtggacgtgagccaggaagaccccgaggtccagttcaactggtacgtggatggcgtggaggtgcataatgccaagacaaagccgcgggaggagcagttcaacagcacgtaccgtgtggtcagcgtcctcaccgtcctgcaccaggactggctgaacggcaaggagtacaagtgcaaggtctccaacaaaggcctcccgtcctccatcgagaaaaccatctccaaagccaaagggcagccccgagagccacaggtgtacaccctgcccccatcccaggaggagatgaccaagaaccaggtcagcctgacctgcctggtcaaaggcttctaccccagcgacatcgccgtggagtgggagagcaatgggcagccggagaacaactacaagaccacgcctcccgtgctggactccgacggctccttcttcctctacagcaggctaaccgtggacaagagcaggtggcaggaggggaatgtcttctcatgctccgtgatgcatgaggctctgcacaaccactacacacagaagagcctctccctgtctctgggtaaatga

SEQ ID NO: 158 - protein, 606 aa, Artificial
  Synthetic construct of 281VL4-CH1(118-131/C131S)-281
MKHLWFFLLLVAAPRWVLSEVQLVQSGSELKKPGSSVKVSCKASGGTSRSFAISWVRQAPGQGLEWMGGIIPIFGPANYAQKFQGRVTITADESTSTAYMELSSLRSEDTAVYYCARHAIAMGWGVITTNYFDSWGQGTMVTVSSASTKGPSVFPLAPSQVQLQESGPGLVKPSETLSLTCTVSGGSISGYYWSWIRQPPGKGLEWIGYIYYSGSTNYNPSLKSRVTISVDTSKNQFSLKLNSVTAADTAVYYCARAPLHGDYKWFHPWGQGTLVTVSSASTKGPSVFPLAPCSRSTSESTAALGCLVKDYFPEPVTVSWNSGALTSGVHTFPAVLQSSGLYSLSSVVTVPSSSLGTKTYTCNVDHKPSNTKVDKRVESKYGPPCPPCPAPEFEGGPSVFLFPPKPKDTLMISRTPEVTCVVVDVSQEDPEVQFNWYVDGVEVHNAKTKPREEQFNSTYRVVSVLTVLHQDWLNGKEYKCKVSNKGLPSSIEKTISKAKGQPREPQVYTLPPSQEEMTKNQVSLTCLVKGFYPSDIAVEWESNGQPENNYKTTPPVLDSDGSFFLYSRLTVDKSRWQEGNVFSCSVMHEALHNHYTQKSLSLSLGK

SEQ ID NO: 159 - DNA, 1788 bp, Artificial
  Synthetic construct of 281VL4-CH1(118-119+C)-281
atgaagcacctgtggttcttcctcctgctggtggcggctcccagatgggtcctgtccgaggtccagctggtgcagtctgggtctgagctgaagaagcctgggtcctcggtgaaggtctcctgcaaggcttctggaggcacctccaggagctttgctatcagctgggtgcgacaggcccctggacaaggacttgagtggatgggagggatcatccctatctttggtccagcaaactacgcacagaagttccagggcagagtcacgattaccgcggacgaatccacgagcacagcctacatggagctgagtagcctgagatctgaggacacggccgtgtattactgtgcgaggcacgctattgctatgggttggggagttattacaacgaactactttgactcctggggccaagggacaatggtcaccgtctcctcagctagctgccaggtgcagctgcaggagtcgggcccaggactggtgaagccttcggagaccctgtccctcacctgcactgtctctggtggctccatcagtggttactactggagctggatccggcagcccccagggaagggactggagtggattgggtatatctattacagtgggagcaccaactacaatccctccctcaagagtcgagtcaccatatcagtagacacgtccaagaaccagttctccctgaagctgaattctgtgaccgctgcggacacggccgtgtattactgtgcgagagcccccttgcacggtgactacaaatggttccacccctggggccagggaaccctggtcaccgtctcctcagctagcaccaaggggccatccgtcttccccctggcgccctgctccaggagcacctccgagagcacagccgccctgggctgcctggtcaaggactacttccccgaaccggtgacggtgtcgtggaactcaggcgccctgaccagcggcgtgcacaccttcccggctgtcctacagtcctcaggactctactccctcagcagcgtggtgaccgtgccctccagcagcttgggcacgaagacctacacctgcaacgtagatcacaagcccagcaacaccaaggtggacaagagagttgagtccaaatatggtcccccatgcccaccatgcccagcacctgagttcgaggggggaccatcagtcttcctgttccccccaaaacccaaggacactctcatgatctcccggacccctgaggtcacgtgcgtggtggtggacgtgagccaggaagaccccgaggtccagttcaactggtacgtggatggcgtggaggtgcataatgccaagacaaagccgcgggaggagcagttcaacagcacgtaccgtgtggtcagcgtcctcaccgtcctgcaccaggactggctgaacggcaaggagtacaagtgcaaggtctccaacaaaggcctcccgtcctccatcgagaaaaccatctccaaagccaaagggcagccccgagagccacaggtgtacaccctgcccccatcccaggaggagatgaccaagaaccaggtcagcctgacctgcctggtcaaaggcttctaccccagcgacatcgccgtggagtgggagagcaatgggcagccggagaacaactacaagaccacgcctcccgtgctggactccgacggctccttcttcctctacagcaggctaaccgtggacaagagcaggtggcaggaggggaatgtcttctcatgctccgtgatgcatgaggctctgcacaaccactacacacagaagagcctctccctgtctctgggtaaatga

SEQ ID NO: 160 - protein, 595 aa, Artificial
  Synthetic construct of 281VL4-CH1(118-119+C)-281
MKHLWFFLLLVAAPRWVLSEVQLVQSGSELKKPGSSVKVSCKASGGTSRSFAISWVRQAPGQGLEWMGGIIPIFGPANYAQKFQGRVTITADESTSTAYMELSSLRSEDTAVYYCARHAIAMGWGVITTNYFDSWGQGTMVTVSSASCQVQLQESGPGLVKPSETLSLTCTVSGGSISGYYWSWIRQPPGKGLEWIGYIYYSGSTNYNPSLKSRVTISVDTSKNQFSLKLNSVTAADTAVYYCARAPLHGDYKWFHPWGQGTLVTVSSASTKGPSVFPLAPCSRSTSESTAALGCLVKDYFPEPVTVSWNSGALTSGVHTFPAVLQSSGLYSLSSVVTVPSSSLGTKTYTCNVDHKPSNTKVDKRVESKYGPPCPPCPAPEFEGGPSVFLFPPKPKDTLMISRTPEVTCVVVDVSQEDPEVQFNWYVDGVEVHNAKTKPREEQFNSTYRVVSVLTVLHQDWLNGKEYKCKVSNKGLPSSIEKTISKAKGQPREPQVYTLPPSQEEMTKNQVSLTCLVKGFYPSDIAVEWESNGQPENNYKTTPPVLDSDGSFFLYSRLTVDKSRWQEGNVFSCSVMHEALHNHYTQKSLSLSLGK

SEQ ID NO: 161 - DNA, 1791 bp, Artificial
  Synthetic construct of 281VL4-CH1(118-120+C)-281
atgaagcacctgtggttcttcctcctgctggtggcggctcccagatgggtcctgtccgaggtccagctggtgcagtctgggtctgagctgaagaagcctgggtcctcggtgaaggtctcctgcaaggcttctggaggcacctccaggagctttgctatcagctgggtgcgacaggcccctggacaaggacttgagtggatgggagggatcatccctatctttggtccagcaaactacgcacagaagttccagggcagagtcacgattaccgcggacgaatccacgagcacagcctacatggagctgagtagcctgagatctgaggacacggccgtgtattactgtgcgaggcacgctattgctatgggttggggagttattacaacgaactactttgactcctggggccaagggacaatggtcaccgtctcctcagctagcacctgccaggtgcagctgcaggagtcgggcccaggactggtgaagccttcggagaccctgtccctcacctgcactgtctctggtggctccatcagtggttactactggagctggatccggcagcccccagggaagggactggagtggattgggtatatctattacagtgggagcaccaactacaatccctccctcaagagtcgagtcaccatatcagtagacacgtccaagaaccagttctccctgaagctgaattctgtgaccgctgcggacacggccgtgtattactgtgcgagagcccccttgcacggtgactacaaatggttccacccctggggccagggaaccctggtcaccgtctcctcagctagcaccaaggggccatccgtcttccccctggcgccctgctccaggagcacctccgagagcacagccgccctgggctgcctggtcaaggactacttccccgaaccggtgacggtgtcgtggaactcaggcgccctgaccagcggcgtgcacaccttcccggctgtcctacagtcctcaggactctactccctcagcagcgtggtgaccgtgccctccagcagcttgggcacgaagacctacacctgcaacgtagatcacaagcccagcaacaccaaggtggacaagagagttgagtccaaatatggtcccccatgcccaccatgcccagcacctgagttcgaggggggaccatcagtcttcctgttccccccaaaacccaaggacactctcatgatctcccggacccctgaggtcacgtgcgtggtggtggacgtgagccaggaagaccccgaggtccagttcaactggtacgtggatggcgtggaggtgcataatgccaagacaaagccgcgggaggagcagttcaacagcacgtaccgtgtggtcagcgtcctcaccgtcctgcaccaggactggctgaacggcaaggagtacaagtgcaaggtctccaacaaaggcctcccgtcctccatcgagaaaaccatctccaaagccaaagggcagccccgagagccacaggtgtacaccctgcccccatcccaggaggagatgaccaagaaccaggtcagcctgacctgcctggtcaaaggcttctaccccagcgacatcgccgtggagtgggagagcaatgggcagccggagaacaactacaagaccacgcctcccgtgctggactccgacggctccttcttcctctacagcaggctaaccgtggacaagagcaggtggcaggaggggaatgtcttctcatgctccgtgatgcatgaggctctgcacaaccactacacacagaagagcctctccctgtctctgggtaaatga

SEQ ID NO: 162 - protein, 596 aa, Artificial
  Synthetic construct of 281VL4-CH1(118-120+C)-281
MKHLWFFLLLVAAPRWVLSEVQLVQSGSELKKPGSSVKVSCKASGGTSRSFAISWVRQAPGQGLEWMGGIIPIFGPANYAQKFQGRVTITADESTSTAYMELSSLRSEDTAVYYCARHAIAMGWGVITTNYFDSWGQGTMVTVSSASTCQVQLQESGPGLVKPSETLSLTCTVSGGSISGYYWSWIRQPPGKGLEWIGYIYYSGSTNYNPSLKSRVTISVDTSKNQFSLKLNSVTAADTAVYYCARAPLHGDYKWFHPWGQGTLVTVSSASTKGPSVFPLAPCSRSTSESTAALGCLVKDYFPEPVTVSWNSGALTSGVHTFPAVLQSSGLYSLSSVVTVPSSSLGTKTYTCNVDHKPSNTKVDKRVESKYGPPCPPCPAPEFEGGPSVFLFPPKPKDTLMISRTPEVTCVVVDVSQEDPEVQFNWYVDGVEVHNAKTKPREEQFNSTYRVVSVLTVLHQDWLNGKEYKCKVSNKGLPSSIEKTISKAKGQPREPQVYTLPPSQEEMTKNQVSLTCLVKGFYPSDIAVEWESNGQPENNYKTTPPVLDSDGSFFLYSRLTVDKSRWQEGNVFSCSVMHEALHNHYTQKSLSLSLGK

SEQ ID NO: 163 - DNA, 1794 bp, Artificial
  Synthetic construct of 281VL4-CH1(118-121+C)-281
atgaagcacctgtggttcttcctcctgctggtggcggctcccagatgggtcctgtccgaggtccagctggtgcagtctgggtctgagctgaagaagcctgggtcctcggtgaaggtctcctgcaaggcttctggaggcacctccaggagctttgctatcagctgggtgcgacaggcccctggacaaggacttgagtggatgggagggatcatccctatctttggtccagcaaactacgcacagaagttccagggcagagtcacgattaccgcggacgaatccacgagcacagcctacatggagctgagtagcctgagatctgaggacacggccgtgtattactgtgcgaggcacgctattgctatgggttggggagttattacaacgaactactttgactcctggggccaagggacaatggtcaccgtctcctcagctagcaccaagtgccaggtgcagctgcaggagtcgggcccaggactggtgaagccttcggagaccctgtccctcacctgcactgtctctggtggctccatcagtggttactactggagctggatccggcagcccccagggaagggactggagtggattgggtatatctattacagtgggagcaccaactacaatccctccctcaagagtcgagtcaccatatcagtagacacgtccaagaaccagttctccctgaagctgaattctgtgaccgctgcggacacggccgtgtattactgtgcgagagcccccttgcacggtgactacaaatggttccacccctggggccagggaaccctggtcaccgtctcctcagctagcaccaaggggccatccgtcttccccctggcgccctgctccaggagcacctccgagagcacagccgccctgggctgcctggtcaaggactacttccccgaaccggtgacggtgtcgtggaactcaggcgccctgaccagcggcgtgcacaccttcccggctgtcctacagtcctcaggactctactccctcagcagcgtggtgaccgtgccctccagcagcttgggcacgaagacctacacctgcaacgtagatcacaagcccagcaacaccaaggtggacaagagagttgagtccaaatatggtcccccatgcccaccatgcccagcacctgagttcgaggggggaccatcagtcttcctgttccccccaaaacccaaggacactctcatgatctcccggacccctgaggtcacgtgcgtggtggtggacgtgagccaggaagaccccgaggtccagttcaactggtacgtggatggcgtggaggtgcataatgccaagacaaagccgcgggaggagcagttcaacagcacgtaccgtgtggtcagcgtcctcaccgtcctgcaccaggactggctgaacggcaaggagtacaagtgcaaggtctccaacaaaggcctcccgtcctccatcgagaaaaccatctccaaagccaaagggcagccccgagagccacaggtgtacaccctgcccccatcccaggaggagatgaccaagaaccaggtcagcctgacctgcctggtcaaaggcttctaccccagcgacatcgccgtggagtgggagagcaatgggcagccggagaacaactacaagaccacgcctcccgtgctggactccgacggctccttcttcctctacagcaggctaaccgtggacaagagcaggtggcaggaggggaatgtcttctcatgctccgtgatgcatgaggctctgcacaaccactacacacagaagagcctctccctgtctctgggtaaatga

SEQ ID NO: 164 - protein, 597 aa, Artificial
  Synthetic construct of 281VL4-CH1(118-121+C)-281
MKHLWFFLLLVAAPRWVLSEVQLVQSGSELKKPGSSVKVSCKASGGTSRSFAISWVRQAPGQGLEWMGGIIPIFGPANYAQKFQGRVTITADESTSTAYMELSSLRSEDTAVYYCARHAIAMGWGVITTNYFDSWGQGTMVTVSSASTKCQVQLQESGPGLVKPSETLSLTCTVSGGSISGYYWSWIRQPPGKGLEWIGYIYYSGSTNYNPSLKSRVTISVDTSKNQFSLKLNSVTAADTAVYYCARAPLHGDYKWFHPWGQGTLVTVSSASTKGPSVFPLAPCSRSTSESTAALGCLVKDYFPEPVTVSWNSGALTSGVHTFPAVLQSSGLYSLSSVVTVPSSSLGTKTYTCNVDHKPSNTKVDKRVESKYGPPCPPCPAPEFEGGPSVFLFPPKPKDTLMISRTPEVTCVVVDVSQEDPEVQFNWYVDGVEVHNAKTKPREEQFNSTYRVVSVLTVLHQDWLNGKEYKCKVSNKGLPSSIEKTISKAKGQPREPQVYTLPPSQEEMTKNQVSLTCLVKGFYPSDIAVEWESNGQPENNYKTTPPVLDSDGSFFLYSRLTVDKSRWQEGNVFSCSVMHEALHNHYTQKSLSLSLGK

SEQ ID NO: 165 - DNA, 1797 bp, Artificial
  Synthetic construct of 281VL4-CH1(118-122+C)-281
atgaagcacctgtggttcttcctcctgctggtggcggctcccagatgggtcctgtccgaggtccagctggtgcagtctgggtctgagctgaagaagcctgggtcctcggtgaaggtctcctgcaaggcttctggaggcacctccaggagctttgctatcagctgggtgcgacaggcccctggacaaggacttgagtggatgggagggatcatccctatctttggtccagcaaactacgcacagaagttccagggcagagtcacgattaccgcggacgaatccacgagcacagcctacatggagctgagtagcctgagatctgaggacacggccgtgtattactgtgcgaggcacgctattgctatgggttggggagttattacaacgaactactttgactcctggggccaagggacaatggtcaccgtctcctcagctagcaccaaggggtgccaggtgcagctgcaggagtcgggcccaggactggtgaagccttcggagaccctgtccctcacctgcactgtctctggtggctccatcagtggttactactggagctggatccggcagcccccagggaagggactggagtggattgggtatatctattacagtgggagcaccaactacaatccctccctcaagagtcgagtcaccatatcagtagacacgtccaagaaccagttctccctgaagctgaattctgtgaccgctgcggacacggccgtgtattactgtgcgagagcccccttgcacggtgactacaaatggttccacccctggggccagggaaccctggtcaccgtctcctcagctagcaccaaggggccatccgtcttccccctggcgccctgctccaggagcacctccgagagcacagccgccctgggctgcctggtcaaggactacttccccgaaccggtgacggtgtcgtggaactcaggcgccctgaccagcggcgtgcacaccttcccggctgtcctacagtcctcaggactctactccctcagcagcgtggtgaccgtgccctccagcagcttgggcacgaagacctacacctgcaacgtagatcacaagcccagcaacaccaaggtggacaagagagttgagtccaaatatggtcccccatgcccaccatgcccagcacctgagttcgaggggggaccatcagtcttcctgttccccccaaaacccaaggacactctcatgatctcccggacccctgaggtcacgtgcgtggtggtggacgtgagccaggaagaccccgaggtccagttcaactggtacgtggatggcgtggaggtgcataatgccaagacaaagccgcgggaggagcagttcaacagcacgtaccgtgtggtcagcgtcctcaccgtcctgcaccaggactggctgaacggcaaggagtacaagtgcaaggtctccaacaaaggcctcccgtcctccatcgagaaaaccatctccaaagccaaagggcagccccgagagccacaggtgtacaccctgcccccatcccaggaggagatgaccaagaaccaggtcagcctgacctgcctggtcaaaggcttctaccccagcgacatcgccgtggagtgggagagcaatgggcagccggagaacaactacaagaccacgcctcccgtgctggactccgacggctccttcttcctctacagcaggctaaccgtggacaagagcaggtggcaggaggggaatgtcttctcatgctccgtgatgcatgaggctctgcacaaccactacacacagaagagcctctccctgtctctgggtaaatga

SEQ ID NO: 166 - protein, 598 aa, Artificial
  Synthetic construct of 281VL4-CH1(118-122+C)-281
MKHLWFFLLLVAAPRWVLSEVQLVQSGSELKKPGSSVKVSCKASGGTSRSFAISWVRQAPGQGLEWMGGIIPIFGPANYAQKFQGRVTITADESTSTAYMELSSLRSEDTAVYYCARHAIAMGWGVITTNYFDSWGQGTMVTVSSASTKGCQVQLQESGPGLVKPSETLSLTCTVSGGSISGYYWSWIRQPPGKGLEWIGYIYYSGSTNYNPSLKSRVTISVDTSKNQFSLKLNSVTAADTAVYYCARAPLHGDYKWFHPWGQGTLVTVSSASTKGPSVFPLAPCSRSTSESTAALGCLVKDYFPEPVTVSWNSGALTSGVHTFPAVLQSSGLYSLSSVVTVPSSSLGTKTYTCNVDHKPSNTKVDKRVESKYGPPCPPCPAPEFEGGPSVFLFPPKPKDTLMISRTPEVTCVVVDVSQEDPEVQFNWYVDGVEVHNAKTKPREEQFNSTYRVVSVLTVLHQDWLNGKEYKCKVSNKGLPSSIEKTISKAKGQPREPQVYTLPPSQEEMTKNQVSLTCLVKGFYPSDIAVEWESNGQPENNYKTTPPVLDSDGSFFLYSRLTVDKSRWQEGNVFSCSVMHEALHNHYTQKSLSLSLGK

SEQ ID NO: 167 - DNA, 1800 bp, Artificial
  Synthetic construct of 281VL4-CH1(118-123+C)-281
atgaagcacctgtggttcttcctcctgctggtggcggctcccagatgggtcctgtccgaggtccagctggtgcagtctgggtctgagctgaagaagcctgggtcctcggtgaaggtctcctgcaaggcttctggaggcacctccaggagctttgctatcagctgggtgcgacaggcccctggacaaggacttgagtggatgggagggatcatccctatctttggtccagcaaactacgcacagaagttccagggcagagtcacgattaccgcggacgaatccacgagcacagcctacatggagctgagtagcctgagatctgaggacacggccgtgtattactgtgcgaggcacgctattgctatgggttggggagttattacaacgaactactttgactcctggggccaagggacaatggtcaccgtctcctcagctagcaccaaggggccatgccaggtgcagctgcaggagtcgggcccaggactggtgaagccttcggagaccctgtccctcacctgcactgtctctggtggctccatcagtggttactactggagctggatccggcagcccccagggaagggactggagtggattgggtatatctattacagtgggagcaccaactacaatccctccctcaagagtcgagtcaccatatcagtagacacgtccaagaaccagttctccctgaagctgaattctgtgaccgctgcggacacggccgtgtattactgtgcgagagcccccttgcacggtgactacaaatggttccacccctggggccagggaaccctggtcaccgtctcctcagctagcaccaaggggccatccgtcttccccctggcgccctgctccaggagcacctccgagagcacagccgccctgggctgcctggtcaaggactacttccccgaaccggtgacggtgtcgtggaactcaggcgccctgaccagcggcgtgcacaccttcccggctgtcctacagtcctcaggactctactccctcagcagcgtggtgaccgtgccctccagcagcttgggcacgaagacctacacctgcaacgtagatcacaagcccagcaacaccaaggtggacaagagagttgagtccaaatatggtcccccatgcccaccatgcccagcacctgagttcgaggggggaccatcagtcttcctgttccccccaaaacccaaggacactctcatgatctcccggacccctgaggtcacgtgcgtggtggtggacgtgagccaggaagaccccgaggtccagttcaactggtacgtggatggcgtggaggtgcataatgccaagacaaagccgcgggaggagcagttcaacagcacgtaccgtgtggtcagcgtcctcaccgtcctgcaccaggactggctgaacggcaaggagtacaagtgcaaggtctccaacaaaggcctcccgtcctccatcgagaaaaccatctccaaagccaaagggcagccccgagagccacaggtgtacaccctgcccccatcccaggaggagatgaccaagaaccaggtcagcctgacctgcctggtcaaaggcttctaccccagcgacatcgccgtggagtgggagagcaatgggcagccggagaacaactacaagaccacgcctcccgtgctggactccgacggctccttcttcctctacagcaggctaaccgtggacaagagcaggtggcaggaggggaatgtcttctcatgctccgtgatgcatgaggctctgcacaaccactacacacagaagagcctctccctgtctctgggtaaatga

SEQ ID NO: 168 - protein, 599 aa, Artificial
  Synthetic construct of 281VL4-CH1(118-123+C)-281
MKHLWFFLLLVAAPRWVLSEVQLVQSGSELKKPGSSVKVSCKASGGTSRSFAISWVRQAPGQGLEWMGGIIPIFGPANYAQKFQGRVTITADESTSTAYMELSSLRSEDTAVYYCARHAIAMGWGVITTNYFDSWGQGTMVTVSSASTKGPCQVQLQESGPGLVKPSETLSLTCTVSGGSISGYYWSWIRQPPGKGLEWIGYIYYSGSTNYNPSLKSRVTISVDTSKNQFSLKLNSVTAADTAVYYCARAPLHGDYKWFHPWGQGTLVTVSSASTKGPSVFPLAPCSRSTSESTAALGCLVKDYFPEPVTVSWNSGALTSGVHTFPAVLQSSGLYSLSSVVTVPSSSLGTKTYTCNVDHKPSNTKVDKRVESKYGPPCPPCPAPEFEGGPSVFLFPPKPKDTLMISRTPEVTCVVVDVSQEDPEVQFNWYVDGVEVHNAKTKPREEQFNSTYRVVSVLTVLHQDWLNGKEYKCKVSNKGLPSSIEKTISKAKGQPREPQVYTLPPSQEEMTKNQVSLTCLVKGFYPSDIAVEWESNGQPENNYKTTPPVLDSDGSFFLYSRLTVDKSRWQEGNVFSCSVMHEALHNHYTQKSLSLSLGK

SEQ ID NO: 169 - DNA, 1803 bp, Artificial
  Synthetic construct of 281VL4-CH1(118-124+C)-281
atgaagcacctgtggttcttcctcctgctggtggcggctcccagatgggtcctgtccgaggtccagctggtgcagtctgggtctgagctgaagaagcctgggtcctcggtgaaggtctcctgcaaggcttctggaggcacctccaggagctttgctatcagctgggtgcgacaggcccctggacaaggacttgagtggatgggagggatcatccctatctttggtccagcaaactacgcacagaagttccagggcagagtcacgattaccgcggacgaatccacgagcacagcctacatggagctgagtagcctgagatctgaggacacggccgtgtattactgtgcgaggcacgctattgctatgggttggggagttattacaacgaactactttgactcctggggccaagggacaatggtcaccgtctcctcagctagcaccaaggggccatcctgccaggtgcagctgcaggagtcgggcccaggactggtgaagccttcggagaccctgtccctcacctgcactgtctctggtggctccatcagtggttactactggagctggatccggcagcccccagggaagggactggagtggattgggtatatctattacagtgggagcaccaactacaatccctccctcaagagtcgagtcaccatatcagtagacacgtccaagaaccagttctccctgaagctgaattctgtgaccgctgcggacacggccgtgtattactgtgcgagagcccccttgcacggtgactacaaatggttccacccctggggccagggaaccctggtcaccgtctcctcagctagcaccaaggggccatccgtcttccccctggcgccctgctccaggagcacctccgagagcacagccgccctgggctgcctggtcaaggactacttccccgaaccggtgacggtgtcgtggaactcaggcgccctgaccagcggcgtgcacaccttcccggctgtcctacagtcctcaggactctactccctcagcagcgtggtgaccgtgccctccagcagcttgggcacgaagacctacacctgcaacgtagatcacaagcccagcaacaccaaggtggacaagagagttgagtccaaatatggtcccccatgcccaccatgcccagcacctgagttcgaggggggaccatcagtcttcctgttccccccaaaacccaaggacactctcatgatctcccggacccctgaggtcacgtgcgtggtggtggacgtgagccaggaagaccccgaggtccagttcaactggtacgtggatggcgtggaggtgcataatgccaagacaaagccgcgggaggagcagttcaacagcacgtaccgtgtggtcagcgtcctcaccgtcctgcaccaggactggctgaacggcaaggagtacaagtgcaaggtctccaacaaaggcctcccgtcctccatcgagaaaaccatctccaaagccaaagggcagccccgagagccacaggtgtacaccctgcccccatcccaggaggagatgaccaagaaccaggtcagcctgacctgcctggtcaaaggcttctaccccagcgacatcgccgtggagtgggagagcaatgggcagccggagaacaactacaagaccacgcctcccgtgctggactccgacggctccttcttcctctacagcaggctaaccgtggacaagagcaggtggcaggaggggaatgtcttctcatgctccgtgatgcatgaggctctgcacaaccactacacacagaagagcctctccctgtctctgggtaaatga

SEQ ID NO: 170 - protein, 600 aa, Artificial
  Synthetic construct of 281VL4-CH1(118-124+C)-281
MKHLWFFLLLVAAPRWVLSEVQLVQSGSELKKPGSSVKVSCKASGGTSRSFAISWVRQAPGQGLEWMGGIIPIFGPANYAQKFQGRVTITADESTSTAYMELSSLRSEDTAVYYCARHAIAMGWGVITTNYFDSWGQGTMVTVSSASTKGPSCQVQLQESGPGLVKPSETLSLTCTVSGGSISGYYWSWIRQPPGKGLEWIGYIYYSGSTNYNPSLKSRVTISVDTSKNQFSLKLNSVTAADTAVYYCARAPLHGDYKWFHPWGQGTLVTVSSASTKGPSVFPLAPCSRSTSESTAALGCLVKDYFPEPVTVSWNSGALTSGVHTFPAVLQSSGLYSLSSVVTVPSSSLGTKTYTCNVDHKPSNTKVDKRVESKYGPPCPPCPAPEFEGGPSVFLFPPKPKDTLMISRTPEVTCVVVDVSQEDPEVQFNWYVDGVEVHNAKTKPREEQFNSTYRVVSVLTVLHQDWLNGKEYKCKVSNKGLPSSIEKTISKAKGQPREPQVYTLPPSQEEMTKNQVSLTCLVKGFYPSDIAVEWESNGQPENNYKTTPPVLDSDGSFFLYSRLTVDKSRWQEGNVFSCSVMHEALHNHYTQKSLSLSLGK

SEQ ID NO: 171 - DNA, 1806 bp, Artificial
  Synthetic construct of 281VL4-CH1(118-125+C)-281
atgaagcacctgtggttcttcctcctgctggtggcggctcccagatgggtcctgtccgaggtccagctggtgcagtctgggtctgagctgaagaagcctgggtcctcggtgaaggtctcctgcaaggcttctggaggcacctccaggagctttgctatcagctgggtgcgacaggcccctggacaaggacttgagtggatgggagggatcatccctatctttggtccagcaaactacgcacagaagttccagggcagagtcacgattaccgcggacgaatccacgagcacagcctacatggagctgagtagcctgagatctgaggacacggccgtgtattactgtgcgaggcacgctattgctatgggttggggagttattacaacgaactactttgactcctggggccaagggacaatggtcaccgtctcctcagctagcaccaaggggccatccgtctgccaggtgcagctgcaggagtcgggcccaggactggtgaagccttcggagaccctgtccctcacctgcactgtctctggtggctccatcagtggttactactggagctggatccggcagcccccagggaagggactggagtggattgggtatatctattacagtgggagcaccaactacaatccctccctcaagagtcgagtcaccatatcagtagacacgtccaagaaccagttctccctgaagctgaattctgtgaccgctgcggacacggccgtgtattactgtgcgagagcccccttgcacggtgactacaaatggttccacccctggggccagggaaccctggtcaccgtctcctcagctagcaccaaggggccatccgtcttccccctggcgccctgctccaggagcacctccgagagcacagccgccctgggctgcctggtcaaggactacttccccgaaccggtgacggtgtcgtggaactcaggcgccctgaccagcggcgtgcacaccttcccggctgtcctacagtcctcaggactctactccctcagcagcgtggtgaccgtgccctccagcagcttgggcacgaagacctacacctgcaacgtagatcacaagcccagcaacaccaaggtggacaagagagttgagtccaaatatggtcccccatgcccaccatgcccagcacctgagttcgaggggggaccatcagtcttcctgttccccccaaaacccaaggacactctcatgatctcccggacccctgaggtcacgtgcgtggtggtggacgtgagccaggaagaccccgaggtccagttcaactggtacgtggatggcgtggaggtgcataatgccaagacaaagccgcgggaggagcagttcaacagcacgtaccgtgtggtcagcgtcctcaccgtcctgcaccaggactggctgaacggcaaggagtacaagtgcaaggtctccaacaaaggcctcccgtcctccatcgagaaaaccatctccaaagccaaagggcagccccgagagccacaggtgtacaccctgcccccatcccaggaggagatgaccaagaaccaggtcagcctgacctgcctggtcaaaggcttctaccccagcgacatcgccgtggagtgggagagcaatgggcagccggagaacaactacaagaccacgcctcccgtgctggactccgacggctccttcttcctctacagcaggctaaccgtggacaagagcaggtggcaggaggggaatgtcttctcatgctccgtgatgcatgaggctctgcacaaccactacacacagaagagcctctccctgtctctgggtaaatga

SEQ ID NO: 172 - protein, 601 aa, Artificial
  Synthetic construct of 281VL4-CH1(118-125+C)-281
MKHLWFFLLLVAAPRWVLSEVQLVQSGSELKKPGSSVKVSCKASGGTSRSFAISWVRQAPGQGLEWMGGIIPIFGPANYAQKFQGRVTITADESTSTAYMELSSLRSEDTAVYYCARHAIAMGWGVITTNYFDSWGQGTMVTVSSASTKGPSVCQVQLQESGPGLVKPSETLSLTCTVSGGSISGYYWSWIRQPPGKGLEWIGYIYYSGSTNYNPSLKSRVTISVDTSKNQFSLKLNSVTAADTAVYYCARAPLHGDYKWFHPWGQGTLVTVSSASTKGPSVFPLAPCSRSTSESTAALGCLVKDYFPEPVTVSWNSGALTSGVHTFPAVLQSSGLYSLSSVVTVPSSSLGTKTYTCNVDHKPSNTKVDKRVESKYGPPCPPCPAPEFEGGPSVFLFPPKPKDTLMISRTPEVTCVVVDVSQEDPEVQFNWYVDGVEVHNAKTKPREEQFNSTYRVVSVLTVLHQDWLNGKEYKCKVSNKGLPSSIEKTISKAKGQPREPQVYTLPPSQEEMTKNQVSLTCLVKGFYPSDIAVEWESNGQPENNYKTTPPVLDSDGSFFLYSRLTVDKSRWQEGNVFSCSVMHEALHNHYTQKSLSLSLGK

SEQ ID NO: 173 - DNA, 1809 bp, Artificial
  Synthetic construct of 281VL4-CH1(118-126+C)-281
atgaagcacctgtggttcttcctcctgctggtggcggctcccagatgggtcctgtccgaggtccagctggtgcagtctgggtctgagctgaagaagcctgggtcctcggtgaaggtctcctgcaaggcttctggaggcacctccaggagctttgctatcagctgggtgcgacaggcccctggacaaggacttgagtggatgggagggatcatccctatctttggtccagcaaactacgcacagaagttccagggcagagtcacgattaccgcggacgaatccacgagcacagcctacatggagctgagtagcctgagatctgaggacacggccgtgtattactgtgcgaggcacgctattgctatgggttggggagttattacaacgaactactttgactcctggggccaagggacaatggtcaccgtctcctcagctagcaccaaggggccatccgtcttctgccaggtgcagctgcaggagtcgggcccaggactggtgaagccttcggagaccctgtccctcacctgcactgtctctggtggctccatcagtggttactactggagctggatccggcagcccccagggaagggactggagtggattgggtatatctattacagtgggagcaccaactacaatccctccctcaagagtcgagtcaccatatcagtagacacgtccaagaaccagttctccctgaagctgaattctgtgaccgctgcggacacggccgtgtattactgtgcgagagcccccttgcacggtgactacaaatggttccacccctggggccagggaaccctggtcaccgtctcctcagctagcaccaaggggccatccgtcttccccctggcgccctgctccaggagcacctccgagagcacagccgccctgggctgcctggtcaaggactacttccccgaaccggtgacggtgtcgtggaactcaggcgccctgaccagcggcgtgcacaccttcccggctgtcctacagtcctcaggactctactccctcagcagcgtggtgaccgtgccctccagcagcttgggcacgaagacctacacctgcaacgtagatcacaagcccagcaacaccaaggtggacaagagagttgagtccaaatatggtcccccatgcccaccatgcccagcacctgagttcgaggggggaccatcagtcttcctgttccccccaaaacccaaggacactctcatgatctcccggacccctgaggtcacgtgcgtggtggtggacgtgagccaggaagaccccgaggtccagttcaactggtacgtggatggcgtggaggtgcataatgccaagacaaagccgcgggaggagcagttcaacagcacgtaccgtgtggtcagcgtcctcaccgtcctgcaccaggactggctgaacggcaaggagtacaagtgcaaggtctccaacaaaggcctcccgtcctccatcgagaaaaccatctccaaagccaaagggcagccccgagagccacaggtgtacaccctgcccccatcccaggaggagatgaccaagaaccaggtcagcctgacctgcctggtcaaaggcttctaccccagcgacatcgccgtggagtgggagagcaatgggcagccggagaacaactacaagaccacgcctcccgtgctggactccgacggctccttcttcctctacagcaggctaaccgtggacaagagcaggtggcaggaggggaatgtcttctcatgctccgtgatgcatgaggctctgcacaaccactacacacagaagagcctctccctgtctctgggtaaatga

SEQ ID NO: 174 - protein, 602 aa, Artificial
  Synthetic construct of 281VL4-CH1(118-126+C)-281
MKHLWFFLLLVAAPRWVLSEVQLVQSGSELKKPGSSVKVSCKASGGTSRSFAISWVRQAPGQGLEWMGGIIPIFGPANYAQKFQGRVTITADESTSTAYMELSSLRSEDTAVYYCARHAIAMGWGVITTNYFDSWGQGTMVTVSSASTKGPSVFCQVQLQESGPGLVKPSETLSLTCTVSGGSISGYYWSWIRQPPGKGLEWIGYIYYSGSTNYNPSLKSRVTISVDTSKNQFSLKLNSVTAADTAVYYCARAPLHGDYKWFHPWGQGTLVTVSSASTKGPSVFPLAPCSRSTSESTAALGCLVKDYFPEPVTVSWNSGALTSGVHTFPAVLQSSGLYSLSSVVTVPSSSLGTKTYTCNVDHKPSNTKVDKRVESKYGPPCPPCPAPEFEGGPSVFLFPPKPKDTLMISRTPEVTCVVVDVSQEDPEVQFNWYVDGVEVHNAKTKPREEQFNSTYRVVSVLTVLHQDWLNGKEYKCKVSNKGLPSSIEKTISKAKGQPREPQVYTLPPSQEEMTKNQVSLTCLVKGFYPSDIAVEWESNGQPENNYKTTPPVLDSDGSFFLYSRLTVDKSRWQEGNVFSCSVMHEALHNHYTQKSLSLSLGK

SEQ ID NO: 175 - DNA, 1812 bp, Artificial
  Synthetic construct of 281VL4-CH1(118-127+C)-281
atgaagcacctgtggttcttcctcctgctggtggcggctcccagatgggtcctgtccgaggtccagctggtgcagtctgggtctgagctgaagaagcctgggtcctcggtgaaggtctcctgcaaggcttctggaggcacctccaggagctttgctatcagctgggtgcgacaggcccctggacaaggacttgagtggatgggagggatcatccctatctttggtccagcaaactacgcacagaagttccagggcagagtcacgattaccgcggacgaatccacgagcacagcctacatggagctgagtagcctgagatctgaggacacggccgtgtattactgtgcgaggcacgctattgctatgggttggggagttattacaacgaactactttgactcctggggccaagggacaatggtcaccgtctcctcagctagcaccaaggggccatccgtcttcccctgccaggtgcagctgcaggagtcgggcccaggactggtgaagccttcggagaccctgtccctcacctgcactgtctctggtggctccatcagtggttactactggagctggatccggcagcccccagggaagggactggagtggattgggtatatctattacagtgggagcaccaactacaatccctccctcaagagtcgagtcaccatatcagtagacacgtccaagaaccagttctccctgaagctgaattctgtgaccgctgcggacacggccgtgtattactgtgcgagagcccccttgcacggtgactacaaatggttccacccctggggccagggaaccctggtcaccgtctcctcagctagcaccaaggggccatccgtcttccccctggcgccctgctccaggagcacctccgagagcacagccgccctgggctgcctggtcaaggactacttccccgaaccggtgacggtgtcgtggaactcaggcgccctgaccagcggcgtgcacaccttcccggctgtcctacagtcctcaggactctactccctcagcagcgtggtgaccgtgccctccagcagcttgggcacgaagacctacacctgcaacgtagatcacaagcccagcaacaccaaggtggacaagagagttgagtccaaatatggtcccccatgcccaccatgcccagcacctgagttcgaggggggaccatcagtcttcctgttccccccaaaacccaaggacactctcatgatctcccggacccctgaggtcacgtgcgtggtggtggacgtgagccaggaagaccccgaggtccagttcaactggtacgtggatggcgtggaggtgcataatgccaagacaaagccgcgggaggagcagttcaacagcacgtaccgtgtggtcagcgtcctcaccgtcctgcaccaggactggctgaacggcaaggagtacaagtgcaaggtctccaacaaaggcctcccgtcctccatcgagaaaaccatctccaaagccaaagggcagccccgagagccacaggtgtacaccctgcccccatcccaggaggagatgaccaagaaccaggtcagcctgacctgcctggtcaaaggcttctaccccagcgacatcgccgtggagtgggagagcaatgggcagccggagaacaactacaagaccacgcctcccgtgctggactccgacggctccttcttcctctacagcaggctaaccgtggacaagagcaggtggcaggaggggaatgtcttctcatgctccgtgatgcatgaggctctgcacaaccactacacacagaagagcctctccctgtctctgggtaaatga

SEQ ID NO: 176 - protein, 603 aa, Artificial
  Synthetic construct of 281VL4-CH1(118-127+C)-281
MKHLWFFLLLVAAPRWVLSEVQLVQSGSELKKPGSSVKVSCKASGGTSRSFAISWVRQAPGQGLEWMGGIIPIFGPANYAQKFQGRVTITADESTSTAYMELSSLRSEDTAVYYCARHAIAMGWGVITTNYFDSWGQGTMVTVSSASTKGPSVFPCQVQLQESGPGLVKPSETLSLTCTVSGGSISGYYWSWIRQPPGKGLEWIGYIYYSGSTNYNPSLKSRVTISVDTSKNQFSLKLNSVTAADTAVYYCARAPLHGDYKWFHPWGQGTLVTVSSASTKGPSVFPLAPCSRSTSESTAALGCLVKDYFPEPVTVSWNSGALTSGVHTFPAVLQSSGLYSLSSVVTVPSSSLGTKTYTCNVDHKPSNTKVDKRVESKYGPPCPPCPAPEFEGGPSVFLFPPKPKDTLMISRTPEVTCVVVDVSQEDPEVQFNWYVDGVEVHNAKTKPREEQFNSTYRVVSVLTVLHQDWLNGKEYKCKVSNKGLPSSIEKTISKAKGQPREPQVYTLPPSQEEMTKNQVSLTCLVKGFYPSDIAVEWESNGQPENNYKTTPPVLDSDGSFFLYSRLTVDKSRWQEGNVFSCSVMHEALHNHYTQKSLSLSLGK

SEQ ID NO: 177 - DNA, 1815 bp, Artificial
  Synthetic construct of 281VL4-CH1(118-128+C)-281
atgaagcacctgtggttcttcctcctgctggtggcggctcccagatgggtcctgtccgaggtccagctggtgcagtctgggtctgagctgaagaagcctgggtcctcggtgaaggtctcctgcaaggcttctggaggcacctccaggagctttgctatcagctgggtgcgacaggcccctggacaaggacttgagtggatgggagggatcatccctatctttggtccagcaaactacgcacagaagttccagggcagagtcacgattaccgcggacgaatccacgagcacagcctacatggagctgagtagcctgagatctgaggacacggccgtgtattactgtgcgaggcacgctattgctatgggttggggagttattacaacgaactactttgactcctggggccaagggacaatggtcaccgtctcctcagctagcaccaaggggccatccgtcttccccctgtgccaggtgcagctgcaggagtcgggcccaggactggtgaagccttcggagaccctgtccctcacctgcactgtctctggtggctccatcagtggttactactggagctggatccggcagcccccagggaagggactggagtggattgggtatatctattacagtgggagcaccaactacaatccctccctcaagagtcgagtcaccatatcagtagacacgtccaagaaccagttctccctgaagctgaattctgtgaccgctgcggacacggccgtgtattactgtgcgagagcccccttgcacggtgactacaaatggttccacccctggggccagggaaccctggtcaccgtctcctcagctagcaccaaggggccatccgtcttccccctggcgccctgctccaggagcacctccgagagcacagccgccctgggctgcctggtcaaggactacttccccgaaccggtgacggtgtcgtggaactcaggcgccctgaccagcggcgtgcacaccttcccggctgtcctacagtcctcaggactctactccctcagcagcgtggtgaccgtgccctccagcagcttgggcacgaagacctacacctgcaacgtagatcacaagcccagcaacaccaaggtggacaagagagttgagtccaaatatggtcccccatgcccaccatgcccagcacctgagttcgaggggggaccatcagtcttcctgttccccccaaaacccaaggacactctcatgatctcccggacccctgaggtcacgtgcgtggtggtggacgtgagccaggaagaccccgaggtccagttcaactggtacgtggatggcgtggaggtgcataatgccaagacaaagccgcgggaggagcagttcaacagcacgtaccgtgtggtcagcgtcctcaccgtcctgcaccaggactggctgaacggcaaggagtacaagtgcaaggtctccaacaaaggcctcccgtcctccatcgagaaaaccatctccaaagccaaagggcagccccgagagccacaggtgtacaccctgcccccatcccaggaggagatgaccaagaaccaggtcagcctgacctgcctggtcaaaggcttctaccccagcgacatcgccgtggagtgggagagcaatgggcagccggagaacaactacaagaccacgcctcccgtgctggactccgacggctccttcttcctctacagcaggctaaccgtggacaagagcaggtggcaggaggggaatgtcttctcatgctccgtgatgcatgaggctctgcacaaccactacacacagaagagcctctccctgtctctgggtaaatga

SEQ ID NO: 178 - protein, 604 aa, Artificial
  Synthetic construct of 281VL4-CH1(118-128+C)-281
MKHLWFFLLLVAAPRWVLSEVQLVQSGSELKKPGSSVKVSCKASGGTSRSFAISWVRQAPGQGLEWMGGIIPIFGPANYAQKFQGRVTITADESTSTAYMELSSLRSEDTAVYYCARHAIAMGWGVITTNYFDSWGQGTMVTVSSASTKGPSVFPLCQVQLQESGPGLVKPSETLSLTCTVSGGSISGYYWSWIRQPPGKGLEWIGYIYYSGSTNYNPSLKSRVTISVDTSKNQFSLKLNSVTAADTAVYYCARAPLHGDYKWFHPWGQGTLVTVSSASTKGPSVFPLAPCSRSTSESTAALGCLVKDYFPEPVTVSWNSGALTSGVHTFPAVLQSSGLYSLSSVVTVPSSSLGTKTYTCNVDHKPSNTKVDKRVESKYGPPCPPCPAPEFEGGPSVFLFPPKPKDTLMISRTPEVTCVVVDVSQEDPEVQFNWYVDGVEVHNAKTKPREEQFNSTYRVVSVLTVLHQDWLNGKEYKCKVSNKGLPSSIEKTISKAKGQPREPQVYTLPPSQEEMTKNQVSLTCLVKGFYPSDIAVEWESNGQPENNYKTTPPVLDSDGSFFLYSRLTVDKSRWQEGNVFSCSVMHEALHNHYTQKSLSLSLGK

SEQ ID NO: 179 - DNA, 1818 bp, Artificial
  Synthetic construct of 281VL4-CH1(118-129+C)-281
atgaagcacctgtggttcttcctcctgctggtggcggctcccagatgggtcctgtccgaggtccagctggtgcagtctgggtctgagctgaagaagcctgggtcctcggtgaaggtctcctgcaaggcttctggaggcacctccaggagctttgctatcagctgggtgcgacaggcccctggacaaggacttgagtggatgggagggatcatccctatctttggtccagcaaactacgcacagaagttccagggcagagtcacgattaccgcggacgaatccacgagcacagcctacatggagctgagtagcctgagatctgaggacacggccgtgtattactgtgcgaggcacgctattgctatgggttggggagttattacaacgaactactttgactcctggggccaagggacaatggtcaccgtctcctcagctagcaccaaggggccatccgtcttccccctggcgtgccaggtgcagctgcaggagtcgggcccaggactggtgaagccttcggagaccctgtccctcacctgcactgtctctggtggctccatcagtggttactactggagctggatccggcagcccccagggaagggactggagtggattgggtatatctattacagtgggagcaccaactacaatccctccctcaagagtcgagtcaccatatcagtagacacgtccaagaaccagttctccctgaagctgaattctgtgaccgctgcggacacggccgtgtattactgtgcgagagcccccttgcacggtgactacaaatggttccacccctggggccagggaaccctggtcaccgtctcctcagctagcaccaaggggccatccgtcttccccctggcgccctgctccaggagcacctccgagagcacagccgccctgggctgcctggtcaaggactacttccccgaaccggtgacggtgtcgtggaactcaggcgccctgaccagcggcgtgcacaccttcccggctgtcctacagtcctcaggactctactccctcagcagcgtggtgaccgtgccctccagcagcttgggcacgaagacctacacctgcaacgtagatcacaagcccagcaacaccaaggtggacaagagagttgagtccaaatatggtcccccatgcccaccatgcccagcacctgagttcgaggggggaccatcagtcttcctgttccccccaaaacccaaggacactctcatgatctcccggacccctgaggtcacgtgcgtggtggtggacgtgagccaggaagaccccgaggtccagttcaactggtacgtggatggcgtggaggtgcataatgccaagacaaagccgcgggaggagcagttcaacagcacgtaccgtgtggtcagcgtcctcaccgtcctgcaccaggactggctgaacggcaaggagtacaagtgcaaggtctccaacaaaggcctcccgtcctccatcgagaaaaccatctccaaagccaaagggcagccccgagagccacaggtgtacaccctgcccccatcccaggaggagatgaccaagaaccaggtcagcctgacctgcctggtcaaaggcttctaccccagcgacatcgccgtggagtgggagagcaatgggcagccggagaacaactacaagaccacgcctcccgtgctggactccgacggctccttcttcctctacagcaggctaaccgtggacaagagcaggtggcaggaggggaatgtcttctcatgctccgtgatgcatgaggctctgcacaaccactacacacagaagagcctctccctgtctctgggtaaatga

SEQ ID NO: 180 - protein, 605 aa, Artificial
  Synthetic construct of 281VL4-CH1(118-129+C)-281
MKHLWFFLLLVAAPRWVLSEVQLVQSGSELKKPGSSVKVSCKASGGTSRSFAISWVRQAPGQGLEWMGGIIPIFGPANYAQKFQGRVTITADESTSTAYMELSSLRSEDTAVYYCARHAIAMGWGVITTNYFDSWGQGTMVTVSSASTKGPSVFPLACQVQLQESGPGLVKPSETLSLTCTVSGGSISGYYWSWIRQPPGKGLEWIGYIYYSGSTNYNPSLKSRVTISVDTSKNQFSLKLNSVTAADTAVYYCARAPLHGDYKWFHPWGQGTLVTVSSASTKGPSVFPLAPCSRSTSESTAALGCLVKDYFPEPVTVSWNSGALTSGVHTFPAVLQSSGLYSLSSVVTVPSSSLGTKTYTCNVDHKPSNTKVDKRVESKYGPPCPPCPAPEFEGGPSVFLFPPKPKDTLMISRTPEVTCVVVDVSQEDPEVQFNWYVDGVEVHNAKTKPREEQFNSTYRVVSVLTVLHQDWLNGKEYKCKVSNKGLPSSIEKTISKAKGQPREPQVYTLPPSQEEMTKNQVSLTCLVKGFYPSDIAVEWESNGQPENNYKTTPPVLDSDGSFFLYSRLTVDKSRWQEGNVFSCSVMHEALHNHYTQKSLSLSLGK

SEQ ID NO: 181 - DNA, 1821 bp, Artificial
  Synthetic construct of 281VL4-CH1(118-131/A118S)-281
atgaagcacctgtggttcttcctcctgctggtggcggctcccagatgggtcctgtccgaggtccagctggtgcagtctgggtctgagctgaagaagcctgggtcctcggtgaaggtctcctgcaaggcttctggaggcacctccaggagctttgctatcagctgggtgcgacaggcccctggacaaggacttgagtggatgggagggatcatccctatctttggtccagcaaactacgcacagaagttccagggcagagtcacgattaccgcggacgaatccacgagcacagcctacatggagctgagtagcctgagatctgaggacacggccgtgtattactgtgcgaggcacgctattgctatgggttggggagttattacaacgaactactttgactcctggggccaagggacaatggtcaccgtctcctcatctagcaccaaggggccatccgtcttccccctggcgccctgccaggtgcagctgcaggagtcgggcccaggactggtgaagccttcggagaccctgtccctcacctgcactgtctctggtggctccatcagtggttactactggagctggatccggcagcccccagggaagggactggagtggattgggtatatctattacagtgggagcaccaactacaatccctccctcaagagtcgagtcaccatatcagtagacacgtccaagaaccagttctccctgaagctgaattctgtgaccgctgcggacacggccgtgtattactgtgcgagagcccccttgcacggtgactacaaatggttccacccctggggccagggaaccctggtcaccgtctcctcagctagcaccaaggggccatccgtcttccccctggcgccctgctccaggagcacctccgagagcacagccgccctgggctgcctggtcaaggactacttccccgaaccggtgacggtgtcgtggaactcaggcgccctgaccagcggcgtgcacaccttcccggctgtcctacagtcctcaggactctactccctcagcagcgtggtgaccgtgccctccagcagcttgggcacgaagacctacacctgcaacgtagatcacaagcccagcaacaccaaggtggacaagagagttgagtccaaatatggtcccccatgcccaccatgcccagcacctgagttcgaggggggaccatcagtcttcctgttccccccaaaacccaaggacactctcatgatctcccggacccctgaggtcacgtgcgtggtggtggacgtgagccaggaagaccccgaggtccagttcaactggtacgtggatggcgtggaggtgcataatgccaagacaaagccgcgggaggagcagttcaacagcacgtaccgtgtggtcagcgtcctcaccgtcctgcaccaggactggctgaacggcaaggagtacaagtgcaaggtctccaacaaaggcctcccgtcctccatcgagaaaaccatctccaaagccaaagggcagccccgagagccacaggtgtacaccctgcccccatcccaggaggagatgaccaagaaccaggtcagcctgacctgcctggtcaaaggcttctaccccagcgacatcgccgtggagtgggagagcaatgggcagccggagaacaactacaagaccacgcctcccgtgctggactccgacggctccttcttcctctacagcaggctaaccgtggacaagagcaggtggcaggaggggaatgtcttctcatgctccgtgatgcatgaggctctgcacaaccactacacacagaagagcctctccctgtctctgggtaaatga

SEQ ID NO: 182 - protein, 606 aa, Artificial
  Synthetic construct of 281VL4-CH1(118-131/A118S)-281
MKHLWFFLLLVAAPRWVLSEVQLVQSGSELKKPGSSVKVSCKASGGTSRSFAISWVRQAPGQGLEWMGGIIPIFGPANYAQKFQGRVTITADESTSTAYMELSSLRSEDTAVYYCARHAIAMGWGVITTNYFDSWGQGTMVTVSSSSTKGPSVFPLAPCQVQLQESGPGLVKPSETLSLTCTVSGGSISGYYWSWIRQPPGKGLEWIGYIYYSGSTNYNPSLKSRVTISVDTSKNQFSLKLNSVTAADTAVYYCARAPLHGDYKWFHPWGQGTLVTVSSASTKGPSVFPLAPCSRSTSESTAALGCLVKDYFPEPVTVSWNSGALTSGVHTFPAVLQSSGLYSLSSVVTVPSSSLGTKTYTCNVDHKPSNTKVDKRVESKYGPPCPPCPAPEFEGGPSVFLFPPKPKDTLMISRTPEVTCVVVDVSQEDPEVQFNWYVDGVEVHNAKTKPREEQFNSTYRVVSVLTVLHQDWLNGKEYKCKVSNKGLPSSIEKTISKAKGQPREPQVYTLPPSQEEMTKNQVSLTCLVKGFYPSDIAVEWESNGQPENNYKTTPPVLDSDGSFFLYSRLTVDKSRWQEGNVFSCSVMHEALHNHYTQKSLSLSLGK

SEQ ID NO: 183 - DNA, 1821 bp, Artificial
  Synthetic construct of 281VL4-CH1(118-131/S119A)-281
atgaagcacctgtggttcttcctcctgctggtggcggctcccagatgggtcctgtccgaggtccagctggtgcagtctgggtctgagctgaagaagcctgggtcctcggtgaaggtctcctgcaaggcttctggaggcacctccaggagctttgctatcagctgggtgcgacaggcccctggacaaggacttgagtggatgggagggatcatccctatctttggtccagcaaactacgcacagaagttccagggcagagtcacgattaccgcggacgaatccacgagcacagcctacatggagctgagtagcctgagatctgaggacacggccgtgtattactgtgcgaggcacgctattgctatgggttggggagttattacaacgaactactttgactcctggggccaagggacaatggtcaccgtctcctcagctgccaccaaggggccatccgtcttccccctggcgccctgccaggtgcagctgcaggagtcgggcccaggactggtgaagccttcggagaccctgtccctcacctgcactgtctctggtggctccatcagtggttactactggagctggatccggcagcccccagggaagggactggagtggattgggtatatctattacagtgggagcaccaactacaatccctccctcaagagtcgagtcaccatatcagtagacacgtccaagaaccagttctccctgaagctgaattctgtgaccgctgcggacacggccgtgtattactgtgcgagagcccccttgcacggtgactacaaatggttccacccctggggccagggaaccctggtcaccgtctcctcagctagcaccaaggggccatccgtcttccccctggcgccctgctccaggagcacctccgagagcacagccgccctgggctgcctggtcaaggactacttccccgaaccggtgacggtgtcgtggaactcaggcgccctgaccagcggcgtgcacaccttcccggctgtcctacagtcctcaggactctactccctcagcagcgtggtgaccgtgccctccagcagcttgggcacgaagacctacacctgcaacgtagatcacaagcccagcaacaccaaggtggacaagagagttgagtccaaatatggtcccccatgcccaccatgcccagcacctgagttcgaggggggaccatcagtcttcctgttccccccaaaacccaaggacactctcatgatctcccggacccctgaggtcacgtgcgtggtggtggacgtgagccaggaagaccccgaggtccagttcaactggtacgtggatggcgtggaggtgcataatgccaagacaaagccgcgggaggagcagttcaacagcacgtaccgtgtggtcagcgtcctcaccgtcctgcaccaggactggctgaacggcaaggagtacaagtgcaaggtctccaacaaaggcctcccgtcctccatcgagaaaaccatctccaaagccaaagggcagccccgagagccacaggtgtacaccctgcccccatcccaggaggagatgaccaagaaccaggtcagcctgacctgcctggtcaaaggcttctaccccagcgacatcgccgtggagtgggagagcaatgggcagccggagaacaactacaagaccacgcctcccgtgctggactccgacggctccttcttcctctacagcaggctaaccgtggacaagagcaggtggcaggaggggaatgtcttctcatgctccgtgatgcatgaggctctgcacaaccactacacacagaagagcctctccctgtctctgggtaaatga

SEQ ID NO: 184 - protein, 606 aa, Artificial
  Synthetic construct of 281VL4-CH1(118-131/S119A)-281
MKHLWFFLLLVAAPRWVLSEVQLVQSGSELKKPGSSVKVSCKASGGTSRSFAISWVRQAPGQGLEWMGGIIPIFGPANYAQKFQGRVTITADESTSTAYMELSSLRSEDTAVYYCARHAIAMGWGVITTNYFDSWGQGTMVTVSSAATKGPSVFPLAPCQVQLQESGPGLVKPSETLSLTCTVSGGSISGYYWSWIRQPPGKGLEWIGYIYYSGSTNYNPSLKSRVTISVDTSKNQFSLKLNSVTAADTAVYYCARAPLHGDYKWFHPWGQGTLVTVSSASTKGPSVFPLAPCSRSTSESTAALGCLVKDYFPEPVTVSWNSGALTSGVHTFPAVLQSSGLYSLSSVVTVPSSSLGTKTYTCNVDHKPSNTKVDKRVESKYGPPCPPCPAPEFEGGPSVFLFPPKPKDTLMISRTPEVTCVVVDVSQEDPEVQFNWYVDGVEVHNAKTKPREEQFNSTYRVVSVLTVLHQDWLNGKEYKCKVSNKGLPSSIEKTISKAKGQPREPQVYTLPPSQEEMTKNQVSLTCLVKGFYPSDIAVEWESNGQPENNYKTTPPVLDSDGSFFLYSRLTVDKSRWQEGNVFSCSVMHEALHNHYTQKSLSLSLGK

SEQ ID NO: 185 - DNA, 1821 bp, Artificial
  Synthetic construct of 281VL4-CH1(118-131/T120A)-281
atgaagcacctgtggttcttcctcctgctggtggcggctcccagatgggtcctgtccgaggtccagctggtgcagtctgggtctgagctgaagaagcctgggtcctcggtgaaggtctcctgcaaggcttctggaggcacctccaggagctttgctatcagctgggtgcgacaggcccctggacaaggacttgagtggatgggagggatcatccctatctttggtccagcaaactacgcacagaagttccagggcagagtcacgattaccgcggacgaatccacgagcacagcctacatggagctgagtagcctgagatctgaggacacggccgtgtattactgtgcgaggcacgctattgctatgggttggggagttattacaacgaactactttgactcctggggccaagggacaatggtcaccgtctcctcagctagcgccaaggggccatccgtcttccccctggcgccctgccaggtgcagctgcaggagtcgggcccaggactggtgaagccttcggagaccctgtccctcacctgcactgtctctggtggctccatcagtggttactactggagctggatccggcagcccccagggaagggactggagtggattgggtatatctattacagtgggagcaccaactacaatccctccctcaagagtcgagtcaccatatcagtagacacgtccaagaaccagttctccctgaagctgaattctgtgaccgctgcggacacggccgtgtattactgtgcgagagcccccttgcacggtgactacaaatggttccacccctggggccagggaaccctggtcaccgtctcctcagctagcaccaaggggccatccgtcttccccctggcgccctgctccaggagcacctccgagagcacagccgccctgggctgcctggtcaaggactacttccccgaaccggtgacggtgtcgtggaactcaggcgccctgaccagcggcgtgcacaccttcccggctgtcctacagtcctcaggactctactccctcagcagcgtggtgaccgtgccctccagcagcttgggcacgaagacctacacctgcaacgtagatcacaagcccagcaacaccaaggtggacaagagagttgagtccaaatatggtcccccatgcccaccatgcccagcacctgagttcgaggggggaccatcagtcttcctgttccccccaaaacccaaggacactctcatgatctcccggacccctgaggtcacgtgcgtggtggtggacgtgagccaggaagaccccgaggtccagttcaactggtacgtggatggcgtggaggtgcataatgccaagacaaagccgcgggaggagcagttcaacagcacgtaccgtgtggtcagcgtcctcaccgtcctgcaccaggactggctgaacggcaaggagtacaagtgcaaggtctccaacaaaggcctcccgtcctccatcgagaaaaccatctccaaagccaaagggcagccccgagagccacaggtgtacaccctgcccccatcccaggaggagatgaccaagaaccaggtcagcctgacctgcctggtcaaaggcttctaccccagcgacatcgccgtggagtgggagagcaatgggcagccggagaacaactacaagaccacgcctcccgtgctggactccgacggctccttcttcctctacagcaggctaaccgtggacaagagcaggtggcaggaggggaatgtcttctcatgctccgtgatgcatgaggctctgcacaaccactacacacagaagagcctctccctgtctctgggtaaatga

SEQ ID NO: 186 - protein, 606 aa, Artificial
  Synthetic construct of 281VL4-CH1(118-131/T120A)-281
MKHLWFFLLLVAAPRWVLSEVQLVQSGSELKKPGSSVKVSCKASGGTSRSFAISWVRQAPGQGLEWMGGIIPIFGPANYAQKFQGRVTITADESTSTAYMELSSLRSEDTAVYYCARHAIAMGWGVITTNYFDSWGQGTMVTVSSASAKGPSVFPLAPCQVQLQESGPGLVKPSETLSLTCTVSGGSISGYYWSWIRQPPGKGLEWIGYIYYSGSTNYNPSLKSRVTISVDTSKNQFSLKLNSVTAADTAVYYCARAPLHGDYKWFHPWGQGTLVTVSSASTKGPSVFPLAPCSRSTSESTAALGCLVKDYFPEPVTVSWNSGALTSGVHTFPAVLQSSGLYSLSSVVTVPSSSLGTKTYTCNVDHKPSNTKVDKRVESKYGPPCPPCPAPEFEGGPSVFLFPPKPKDTLMISRTPEVTCVVVDVSQEDPEVQFNWYVDGVEVHNAKTKPREEQFNSTYRVVSVLTVLHQDWLNGKEYKCKVSNKGLPSSIEKTISKAKGQPREPQVYTLPPSQEEMTKNQVSLTCLVKGFYPSDIAVEWESNGQPENNYKTTPPVLDSDGSFFLYSRLTVDKSRWQEGNVFSCSVMHEALHNHYTQKSLSLSLGK

SEQ ID NO: 187 - DNA, 1821 bp, Artificial
  Synthetic construct of 281VL4-CH1(118-131/K121A)-281
atgaagcacctgtggttcttcctcctgctggtggcggctcccagatgggtcctgtccgaggtccagctggtgcagtctgggtctgagctgaagaagcctgggtcctcggtgaaggtctcctgcaaggcttctggaggcacctccaggagctttgctatcagctgggtgcgacaggcccctggacaaggacttgagtggatgggagggatcatccctatctttggtccagcaaactacgcacagaagttccagggcagagtcacgattaccgcggacgaatccacgagcacagcctacatggagctgagtagcctgagatctgaggacacggccgtgtattactgtgcgaggcacgctattgctatgggttggggagttattacaacgaactactttgactcctggggccaagggacaatggtcaccgtctcctcagctagcaccgcggggccatccgtcttccccctggcgccctgccaggtgcagctgcaggagtcgggcccaggactggtgaagccttcggagaccctgtccctcacctgcactgtctctggtggctccatcagtggttactactggagctggatccggcagcccccagggaagggactggagtggattgggtatatctattacagtgggagcaccaactacaatccctccctcaagagtcgagtcaccatatcagtagacacgtccaagaaccagttctccctgaagctgaattctgtgaccgctgcggacacggccgtgtattactgtgcgagagcccccttgcacggtgactacaaatggttccacccctggggccagggaaccctggtcaccgtctcctcagctagcaccaaggggccatccgtcttccccctggcgccctgctccaggagcacctccgagagcacagccgccctgggctgcctggtcaaggactacttccccgaaccggtgacggtgtcgtggaactcaggcgccctgaccagcggcgtgcacaccttcccggctgtcctacagtcctcaggactctactccctcagcagcgtggtgaccgtgccctccagcagcttgggcacgaagacctacacctgcaacgtagatcacaagcccagcaacaccaaggtggacaagagagttgagtccaaatatggtcccccatgcccaccatgcccagcacctgagttcgaggggggaccatcagtcttcctgttccccccaaaacccaaggacactctcatgatctcccggacccctgaggtcacgtgcgtggtggtggacgtgagccaggaagaccccgaggtccagttcaactggtacgtggatggcgtggaggtgcataatgccaagacaaagccgcgggaggagcagttcaacagcacgtaccgtgtggtcagcgtcctcaccgtcctgcaccaggactggctgaacggcaaggagtacaagtgcaaggtctccaacaaaggcctcccgtcctccatcgagaaaaccatctccaaagccaaagggcagccccgagagccacaggtgtacaccctgcccccatcccaggaggagatgaccaagaaccaggtcagcctgacctgcctggtcaaaggcttctaccccagcgacatcgccgtggagtgggagagcaatgggcagccggagaacaactacaagaccacgcctcccgtgctggactccgacggctccttcttcctctacagcaggctaaccgtggacaagagcaggtggcaggaggggaatgtcttctcatgctccgtgatgcatgaggctctgcacaaccactacacacagaagagcctctccctgtctctgggtaaatga

SEQ ID NO: 188 - protein, 606 aa, Artificial
  Synthetic construct of 281VL4-CH1(118-131/K121A)-281
MKHLWFFLLLVAAPRWVLSEVQLVQSGSELKKPGSSVKVSCKASGGTSRSFAISWVRQAPGQGLEWMGGIIPIFGPANYAQKFQGRVTITADESTSTAYMELSSLRSEDTAVYYCARHAIAMGWGVITTNYFDSWGQGTMVTVSSASTAGPSVFPLAPCQVQLQESGPGLVKPSETLSLTCTVSGGSISGYYWSWIRQPPGKGLEWIGYIYYSGSTNYNPSLKSRVTISVDTSKNQFSLKLNSVTAADTAVYYCARAPLHGDYKWFHPWGQGTLVTVSSASTKGPSVFPLAPCSRSTSESTAALGCLVKDYFPEPVTVSWNSGALTSGVHTFPAVLQSSGLYSLSSVVTVPSSSLGTKTYTCNVDHKPSNTKVDKRVESKYGPPCPPCPAPEFEGGPSVFLFPPKPKDTLMISRTPEVTCVVVDVSQEDPEVQFNWYVDGVEVHNAKTKPREEQFNSTYRVVSVLTVLHQDWLNGKEYKCKVSNKGLPSSIEKTISKAKGQPREPQVYTLPPSQEEMTKNQVSLTCLVKGFYPSDIAVEWESNGQPENNYKTTPPVLDSDGSFFLYSRLTVDKSRWQEGNVFSCSVMHEALHNHYTQKSLSLSLGK

SEQ ID NO: 189 - DNA, 1821 bp, Artificial
  Synthetic construct of 281VL4-CH1(118-131/G122A)-281
atgaagcacctgtggttcttcctcctgctggtggcggctcccagatgggtcctgtccgaggtccagctggtgcagtctgggtctgagctgaagaagcctgggtcctcggtgaaggtctcctgcaaggcttctggaggcacctccaggagctttgctatcagctgggtgcgacaggcccctggacaaggacttgagtggatgggagggatcatccctatctttggtccagcaaactacgcacagaagttccagggcagagtcacgattaccgcggacgaatccacgagcacagcctacatggagctgagtagcctgagatctgaggacacggccgtgtattactgtgcgaggcacgctattgctatgggttggggagttattacaacgaactactttgactcctggggccaagggacaatggtcaccgtctcctcagctagcaccaaggcgccatccgtcttccccctggcgccctgccaggtgcagctgcaggagtcgggcccaggactggtgaagccttcggagaccctgtccctcacctgcactgtctctggtggctccatcagtggttactactggagctggatccggcagcccccagggaagggactggagtggattgggtatatctattacagtgggagcaccaactacaatccctccctcaagagtcgagtcaccatatcagtagacacgtccaagaaccagttctccctgaagctgaattctgtgaccgctgcggacacggccgtgtattactgtgcgagagcccccttgcacggtgactacaaatggttccacccctggggccagggaaccctggtcaccgtctcctcagctagcaccaaggggccatccgtcttccccctggcgccctgctccaggagcacctccgagagcacagccgccctgggctgcctggtcaaggactacttccccgaaccggtgacggtgtcgtggaactcaggcgccctgaccagcggcgtgcacaccttcccggctgtcctacagtcctcaggactctactccctcagcagcgtggtgaccgtgccctccagcagcttgggcacgaagacctacacctgcaacgtagatcacaagcccagcaacaccaaggtggacaagagagttgagtccaaatatggtcccccatgcccaccatgcccagcacctgagttcgaggggggaccatcagtcttcctgttccccccaaaacccaaggacactctcatgatctcccggacccctgaggtcacgtgcgtggtggtggacgtgagccaggaagaccccgaggtccagttcaactggtacgtggatggcgtggaggtgcataatgccaagacaaagccgcgggaggagcagttcaacagcacgtaccgtgtggtcagcgtcctcaccgtcctgcaccaggactggctgaacggcaaggagtacaagtgcaaggtctccaacaaaggcctcccgtcctccatcgagaaaaccatctccaaagccaaagggcagccccgagagccacaggtgtacaccctgcccccatcccaggaggagatgaccaagaaccaggtcagcctgacctgcctggtcaaaggcttctaccccagcgacatcgccgtggagtgggagagcaatgggcagccggagaacaactacaagaccacgcctcccgtgctggactccgacggctccttcttcctctacagcaggctaaccgtggacaagagcaggtggcaggaggggaatgtcttctcatgctccgtgatgcatgaggctctgcacaaccactacacacagaagagcctctccctgtctctgggtaaatga

SEQ ID NO: 190 - protein, 606 aa, Artificial
  Synthetic construct of 281VL4-CH1(118-131/G122A)-281
MKHLWFFLLLVAAPRWVLSEVQLVQSGSELKKPGSSVKVSCKASGGTSRSFAISWVRQAPGQGLEWMGGIIPIFGPANYAQKFQGRVTITADESTSTAYMELSSLRSEDTAVYYCARHAIAMGWGVITTNYFDSWGQGTMVTVSSASTKAPSVFPLAPCQVQLQESGPGLVKPSETLSLTCTVSGGSISGYYWSWIRQPPGKGLEWIGYIYYSGSTNYNPSLKSRVTISVDTSKNQFSLKLNSVTAADTAVYYCARAPLHGDYKWFHPWGQGTLVTVSSASTKGPSVFPLAPCSRSTSESTAALGCLVKDYFPEPVTVSWNSGALTSGVHTFPAVLQSSGLYSLSSVVTVPSSSLGTKTYTCNVDHKPSNTKVDKRVESKYGPPCPPCPAPEFEGGPSVFLFPPKPKDTLMISRTPEVTCVVVDVSQEDPEVQFNWYVDGVEVHNAKTKPREEQFNSTYRVVSVLTVLHQDWLNGKEYKCKVSNKGLPSSIEKTISKAKGQPREPQVYTLPPSQEEMTKNQVSLTCLVKGFYPSDIAVEWESNGQPENNYKTTPPVLDSDGSFFLYSRLTVDKSRWQEGNVFSCSVMHEALHNHYTQKSLSLSLGK

SEQ ID NO: 191 - DNA, 1821 bp, Artificial
  Synthetic construct of 281VL4-CH1(118-131/P123A)-281
atgaagcacctgtggttcttcctcctgctggtggcggctcccagatgggtcctgtccgaggtccagctggtgcagtctgggtctgagctgaagaagcctgggtcctcggtgaaggtctcctgcaaggcttctggaggcacctccaggagctttgctatcagctgggtgcgacaggcccctggacaaggacttgagtggatgggagggatcatccctatctttggtccagcaaactacgcacagaagttccagggcagagtcacgattaccgcggacgaatccacgagcacagcctacatggagctgagtagcctgagatctgaggacacggccgtgtattactgtgcgaggcacgctattgctatgggttggggagttattacaacgaactactttgactcctggggccaagggacaatggtcaccgtctcctcagctagcaccaagggggcatccgtcttccccctggcgccctgccaggtgcagctgcaggagtcgggcccaggactggtgaagccttcggagaccctgtccctcacctgcactgtctctggtggctccatcagtggttactactggagctggatccggcagcccccagggaagggactggagtggattgggtatatctattacagtgggagcaccaactacaatccctccctcaagagtcgagtcaccatatcagtagacacgtccaagaaccagttctccctgaagctgaattctgtgaccgctgcggacacggccgtgtattactgtgcgagagcccccttgcacggtgactacaaatggttccacccctggggccagggaaccctggtcaccgtctcctcagctagcaccaaggggccatccgtcttccccctggcgccctgctccaggagcacctccgagagcacagccgccctgggctgcctggtcaaggactacttccccgaaccggtgacggtgtcgtggaactcaggcgccctgaccagcggcgtgcacaccttcccggctgtcctacagtcctcaggactctactccctcagcagcgtggtgaccgtgccctccagcagcttgggcacgaagacctacacctgcaacgtagatcacaagcccagcaacaccaaggtggacaagagagttgagtccaaatatggtcccccatgcccaccatgcccagcacctgagttcgaggggggaccatcagtcttcctgttccccccaaaacccaaggacactctcatgatctcccggacccctgaggtcacgtgcgtggtggtggacgtgagccaggaagaccccgaggtccagttcaactggtacgtggatggcgtggaggtgcataatgccaagacaaagccgcgggaggagcagttcaacagcacgtaccgtgtggtcagcgtcctcaccgtcctgcaccaggactggctgaacggcaaggagtacaagtgcaaggtctccaacaaaggcctcccgtcctccatcgagaaaaccatctccaaagccaaagggcagccccgagagccacaggtgtacaccctgcccccatcccaggaggagatgaccaagaaccaggtcagcctgacctgcctggtcaaaggcttctaccccagcgacatcgccgtggagtgggagagcaatgggcagccggagaacaactacaagaccacgcctcccgtgctggactccgacggctccttcttcctctacagcaggctaaccgtggacaagagcaggtggcaggaggggaatgtcttctcatgctccgtgatgcatgaggctctgcacaaccactacacacagaagagcctctccctgtctctgggtaaatga

SEQ ID NO: 192 - protein, 606 aa, Artificial
  Synthetic construct of 281VL4-CH1(118-131/P123A)-281
MKHLWFFLLLVAAPRWVLSEVQLVQSGSELKKPGSSVKVSCKASGGTSRSFAISWVRQAPGQGLEWMGGIIPIFGPANYAQKFQGRVTITADESTSTAYMELSSLRSEDTAVYYCARHAIAMGWGVITTNYFDSWGQGTMVTVSSASTKGASVFPLAPCQVQLQESGPGLVKPSETLSLTCTVSGGSISGYYWSWIRQPPGKGLEWIGYIYYSGSTNYNPSLKSRVTISVDTSKNQFSLKLNSVTAADTAVYYCARAPLHGDYKWFHPWGQGTLVTVSSASTKGPSVFPLAPCSRSTSESTAALGCLVKDYFPEPVTVSWNSGALTSGVHTFPAVLQSSGLYSLSSVVTVPSSSLGTKTYTCNVDHKPSNTKVDKRVESKYGPPCPPCPAPEFEGGPSVFLFPPKPKDTLMISRTPEVTCVVVDVSQEDPEVQFNWYVDGVEVHNAKTKPREEQFNSTYRVVSVLTVLHQDWLNGKEYKCKVSNKGLPSSIEKTISKAKGQPREPQVYTLPPSQEEMTKNQVSLTCLVKGFYPSDIAVEWESNGQPENNYKTTPPVLDSDGSFFLYSRLTVDKSRWQEGNVFSCSVMHEALHNHYTQKSLSLSLGK

SEQ ID NO: 193 - DNA, 1821 bp, Artificial
  Synthetic construct of 281VL4-CH1(118-131/S124A)-281
atgaagcacctgtggttcttcctcctgctggtggcggctcccagatgggtcctgtccgaggtccagctggtgcagtctgggtctgagctgaagaagcctgggtcctcggtgaaggtctcctgcaaggcttctggaggcacctccaggagctttgctatcagctgggtgcgacaggcccctggacaaggacttgagtggatgggagggatcatccctatctttggtccagcaaactacgcacagaagttccagggcagagtcacgattaccgcggacgaatccacgagcacagcctacatggagctgagtagcctgagatctgaggacacggccgtgtattactgtgcgaggcacgctattgctatgggttggggagttattacaacgaactactttgactcctggggccaagggacaatggtcaccgtctcctcagctagcaccaaggggccagccgtcttccccctggcgccctgccaggtgcagctgcaggagtcgggcccaggactggtgaagccttcggagaccctgtccctcacctgcactgtctctggtggctccatcagtggttactactggagctggatccggcagcccccagggaagggactggagtggattgggtatatctattacagtgggagcaccaactacaatccctccctcaagagtcgagtcaccatatcagtagacacgtccaagaaccagttctccctgaagctgaattctgtgaccgctgcggacacggccgtgtattactgtgcgagagcccccttgcacggtgactacaaatggttccacccctggggccagggaaccctggtcaccgtctcctcagctagcaccaaggggccatccgtcttccccctggcgccctgctccaggagcacctccgagagcacagccgccctgggctgcctggtcaaggactacttccccgaaccggtgacggtgtcgtggaactcaggcgccctgaccagcggcgtgcacaccttcccggctgtcctacagtcctcaggactctactccctcagcagcgtggtgaccgtgccctccagcagcttgggcacgaagacctacacctgcaacgtagatcacaagcccagcaacaccaaggtggacaagagagttgagtccaaatatggtcccccatgcccaccatgcccagcacctgagttcgaggggggaccatcagtcttcctgttccccccaaaacccaaggacactctcatgatctcccggacccctgaggtcacgtgcgtggtggtggacgtgagccaggaagaccccgaggtccagttcaactggtacgtggatggcgtggaggtgcataatgccaagacaaagccgcgggaggagcagttcaacagcacgtaccgtgtggtcagcgtcctcaccgtcctgcaccaggactggctgaacggcaaggagtacaagtgcaaggtctccaacaaaggcctcccgtcctccatcgagaaaaccatctccaaagccaaagggcagccccgagagccacaggtgtacaccctgcccccatcccaggaggagatgaccaagaaccaggtcagcctgacctgcctggtcaaaggcttctaccccagcgacatcgccgtggagtgggagagcaatgggcagccggagaacaactacaagaccacgcctcccgtgctggactccgacggctccttcttcctctacagcaggctaaccgtggacaagagcaggtggcaggaggggaatgtcttctcatgctccgtgatgcatgaggctctgcacaaccactacacacagaagagcctctccctgtctctgggtaaatga

SEQ ID NO: 194 - protein, 606 aa, Artificial
  Synthetic construct of 281VL4-CH1(118-131/S124A)-281
MKHLWFFLLLVAAPRWVLSEVQLVQSGSELKKPGSSVKVSCKASGGTSRSFAISWVRQAPGQGLEWMGGIIPIFGPANYAQKFQGRVTITADESTSTAYMELSSLRSEDTAVYYCARHAIAMGWGVITTNYFDSWGQGTMVTVSSASTKGPAVFPLAPCQVQLQESGPGLVKPSETLSLTCTVSGGSISGYYWSWIRQPPGKGLEWIGYIYYSGSTNYNPSLKSRVTISVDTSKNQFSLKLNSVTAADTAVYYCARAPLHGDYKWFHPWGQGTLVTVSSASTKGPSVFPLAPCSRSTSESTAALGCLVKDYFPEPVTVSWNSGALTSGVHTFPAVLQSSGLYSLSSVVTVPSSSLGTKTYTCNVDHKPSNTKVDKRVESKYGPPCPPCPAPEFEGGPSVFLFPPKPKDTLMISRTPEVTCVVVDVSQEDPEVQFNWYVDGVEVHNAKTKPREEQFNSTYRVVSVLTVLHQDWLNGKEYKCKVSNKGLPSSIEKTISKAKGQPREPQVYTLPPSQEEMTKNQVSLTCLVKGFYPSDIAVEWESNGQPENNYKTTPPVLDSDGSFFLYSRLTVDKSRWQEGNVFSCSVMHEALHNHYTQKSLSLSLGK

SEQ ID NO: 195 - DNA, 1821 bp, Artificial
  Synthetic construct of 281VL4-CH1(118-131/V125A)-281
atgaagcacctgtggttcttcctcctgctggtggcggctcccagatgggtcctgtccgaggtccagctggtgcagtctgggtctgagctgaagaagcctgggtcctcggtgaaggtctcctgcaaggcttctggaggcacctccaggagctttgctatcagctgggtgcgacaggcccctggacaaggacttgagtggatgggagggatcatccctatctttggtccagcaaactacgcacagaagttccagggcagagtcacgattaccgcggacgaatccacgagcacagcctacatggagctgagtagcctgagatctgaggacacggccgtgtattactgtgcgaggcacgctattgctatgggttggggagttattacaacgaactactttgactcctggggccaagggacaatggtcaccgtctcctcagctagcaccaaggggccatccgccttccccctggcgccctgccaggtgcagctgcaggagtcgggcccaggactggtgaagccttcggagaccctgtccctcacctgcactgtctctggtggctccatcagtggttactactggagctggatccggcagcccccagggaagggactggagtggattgggtatatctattacagtgggagcaccaactacaatccctccctcaagagtcgagtcaccatatcagtagacacgtccaagaaccagttctccctgaagctgaattctgtgaccgctgcggacacggccgtgtattactgtgcgagagcccccttgcacggtgactacaaatggttccacccctggggccagggaaccctggtcaccgtctcctcagctagcaccaaggggccatccgtcttccccctggcgccctgctccaggagcacctccgagagcacagccgccctgggctgcctggtcaaggactacttccccgaaccggtgacggtgtcgtggaactcaggcgccctgaccagcggcgtgcacaccttcccggctgtcctacagtcctcaggactctactccctcagcagcgtggtgaccgtgccctccagcagcttgggcacgaagacctacacctgcaacgtagatcacaagcccagcaacaccaaggtggacaagagagttgagtccaaatatggtcccccatgcccaccatgcccagcacctgagttcgaggggggaccatcagtcttcctgttccccccaaaacccaaggacactctcatgatctcccggacccctgaggtcacgtgcgtggtggtggacgtgagccaggaagaccccgaggtccagttcaactggtacgtggatggcgtggaggtgcataatgccaagacaaagccgcgggaggagcagttcaacagcacgtaccgtgtggtcagcgtcctcaccgtcctgcaccaggactggctgaacggcaaggagtacaagtgcaaggtctccaacaaaggcctcccgtcctccatcgagaaaaccatctccaaagccaaagggcagccccgagagccacaggtgtacaccctgcccccatcccaggaggagatgaccaagaaccaggtcagcctgacctgcctggtcaaaggcttctaccccagcgacatcgccgtggagtgggagagcaatgggcagccggagaacaactacaagaccacgcctcccgtgctggactccgacggctccttcttcctctacagcaggctaaccgtggacaagagcaggtggcaggaggggaatgtcttctcatgctccgtgatgcatgaggctctgcacaaccactacacacagaagagcctctccctgtctctgggtaaatga

SEQ ID NO: 196 - protein, 606 aa, Artificial
  Synthetic construct of 281VL4-CH1(118-131/V125A)-281
MKHLWFFLLLVAAPRWVLSEVQLVQSGSELKKPGSSVKVSCKASGGTSRSFAISWVRQAPGQGLEWMGGIIPIFGPANYAQKFQGRVTITADESTSTAYMELSSLRSEDTAVYYCARHAIAMGWGVITTNYFDSWGQGTMVTVSSASTKGPSAFPLAPCQVQLQESGPGLVKPSETLSLTCTVSGGSISGYYWSWIRQPPGKGLEWIGYIYYSGSTNYNPSLKSRVTISVDTSKNQFSLKLNSVTAADTAVYYCARAPLHGDYKWFHPWGQGTLVTVSSASTKGPSVFPLAPCSRSTSESTAALGCLVKDYFPEPVTVSWNSGALTSGVHTFPAVLQSSGLYSLSSVVTVPSSSLGTKTYTCNVDHKPSNTKVDKRVESKYGPPCPPCPAPEFEGGPSVFLFPPKPKDTLMISRTPEVTCVVVDVSQEDPEVQFNWYVDGVEVHNAKTKPREEQFNSTYRVVSVLTVLHQDWLNGKEYKCKVSNKGLPSSIEKTISKAKGQPREPQVYTLPPSQEEMTKNQVSLTCLVKGFYPSDIAVEWESNGQPENNYKTTPPVLDSDGSFFLYSRLTVDKSRWQEGNVFSCSVMHEALHNHYTQKSLSLSLGK

SEQ ID NO: 197 - DNA, 1821 bp, Artificial
  Synthetic construct of 281VL4-CH1(118-131/F126A)-281
atgaagcacctgtggttcttcctcctgctggtggcggctcccagatgggtcctgtccgaggtccagctggtgcagtctgggtctgagctgaagaagcctgggtcctcggtgaaggtctcctgcaaggcttctggaggcacctccaggagctttgctatcagctgggtgcgacaggcccctggacaaggacttgagtggatgggagggatcatccctatctttggtccagcaaactacgcacagaagttccagggcagagtcacgattaccgcggacgaatccacgagcacagcctacatggagctgagtagcctgagatctgaggacacggccgtgtattactgtgcgaggcacgctattgctatgggttggggagttattacaacgaactactttgactcctggggccaagggacaatggtcaccgtctcctcagctagcaccaaggggccatccgtcgcccccctggcgccctgccaggtgcagctgcaggagtcgggcccaggactggtgaagccttcggagaccctgtccctcacctgcactgtctctggtggctccatcagtggttactactggagctggatccggcagcccccagggaagggactggagtggattgggtatatctattacagtgggagcaccaactacaatccctccctcaagagtcgagtcaccatatcagtagacacgtccaagaaccagttctccctgaagctgaattctgtgaccgctgcggacacggccgtgtattactgtgcgagagcccccttgcacggtgactacaaatggttccacccctggggccagggaaccctggtcaccgtctcctcagctagcaccaaggggccatccgtcttccccctggcgccctgctccaggagcacctccgagagcacagccgccctgggctgcctggtcaaggactacttccccgaaccggtgacggtgtcgtggaactcaggcgccctgaccagcggcgtgcacaccttcccggctgtcctacagtcctcaggactctactccctcagcagcgtggtgaccgtgccctccagcagcttgggcacgaagacctacacctgcaacgtagatcacaagcccagcaacaccaaggtggacaagagagttgagtccaaatatggtcccccatgcccaccatgcccagcacctgagttcgaggggggaccatcagtcttcctgttccccccaaaacccaaggacactctcatgatctcccggacccctgaggtcacgtgcgtggtggtggacgtgagccaggaagaccccgaggtccagttcaactggtacgtggatggcgtggaggtgcataatgccaagacaaagccgcgggaggagcagttcaacagcacgtaccgtgtggtcagcgtcctcaccgtcctgcaccaggactggctgaacggcaaggagtacaagtgcaaggtctccaacaaaggcctcccgtcctccatcgagaaaaccatctccaaagccaaagggcagccccgagagccacaggtgtacaccctgcccccatcccaggaggagatgaccaagaaccaggtcagcctgacctgcctggtcaaaggcttctaccccagcgacatcgccgtggagtgggagagcaatgggcagccggagaacaactacaagaccacgcctcccgtgctggactccgacggctccttcttcctctacagcaggctaaccgtggacaagagcaggtggcaggaggggaatgtcttctcatgctccgtgatgcatgaggctctgcacaaccactacacacagaagagcctctccctgtctctgggtaaatga

SEQ ID NO: 198 - protein, 606 aa, Artificial
  Synthetic construct of 281VL4-CH1(118-131/F126A)-281
MKHLWFFLLLVAAPRWVLSEVQLVQSGSELKKPGSSVKVSCKASGGTSRSFAISWVRQAPGQGLEWMGGIIPIFGPANYAQKFQGRVTITADESTSTAYMELSSLRSEDTAVYYCARHAIAMGWGVITTNYFDSWGQGTMVTVSSASTKGPSVAPLAPCQVQLQESGPGLVKPSETLSLTCTVSGGSISGYYWSWIRQPPGKGLEWIGYIYYSGSTNYNPSLKSRVTISVDTSKNQFSLKLNSVTAADTAVYYCARAPLHGDYKWFHPWGQGTLVTVSSASTKGPSVFPLAPCSRSTSESTAALGCLVKDYFPEPVTVSWNSGALTSGVHTFPAVLQSSGLYSLSSVVTVPSSSLGTKTYTCNVDHKPSNTKVDKRVESKYGPPCPPCPAPEFEGGPSVFLFPPKPKDTLMISRTPEVTCVVVDVSQEDPEVQFNWYVDGVEVHNAKTKPREEQFNSTYRVVSVLTVLHQDWLNGKEYKCKVSNKGLPSSIEKTISKAKGQPREPQVYTLPPSQEEMTKNQVSLTCLVKGFYPSDIAVEWESNGQPENNYKTTPPVLDSDGSFFLYSRLTVDKSRWQEGNVFSCSVMHEALHNHYTQKSLSLSLGK

SEQ ID NO: 199 - DNA, 1821 bp, Artificial
  Synthetic construct of 281VL4-CH1(118-131/P127A)-281
atgaagcacctgtggttcttcctcctgctggtggcggctcccagatgggtcctgtccgaggtccagctggtgcagtctgggtctgagctgaagaagcctgggtcctcggtgaaggtctcctgcaaggcttctggaggcacctccaggagctttgctatcagctgggtgcgacaggcccctggacaaggacttgagtggatgggagggatcatccctatctttggtccagcaaactacgcacagaagttccagggcagagtcacgattaccgcggacgaatccacgagcacagcctacatggagctgagtagcctgagatctgaggacacggccgtgtattactgtgcgaggcacgctattgctatgggttggggagttattacaacgaactactttgactcctggggccaagggacaatggtcaccgtctcctcagctagcaccaaggggccatccgtcttcgccctggcgccctgccaggtgcagctgcaggagtcgggcccaggactggtgaagccttcggagaccctgtccctcacctgcactgtctctggtggctccatcagtggttactactggagctggatccggcagcccccagggaagggactggagtggattgggtatatctattacagtgggagcaccaactacaatccctccctcaagagtcgagtcaccatatcagtagacacgtccaagaaccagttctccctgaagctgaattctgtgaccgctgcggacacggccgtgtattactgtgcgagagcccccttgcacggtgactacaaatggttccacccctggggccagggaaccctggtcaccgtctcctcagctagcaccaaggggccatccgtcttccccctggcgccctgctccaggagcacctccgagagcacagccgccctgggctgcctggtcaaggactacttccccgaaccggtgacggtgtcgtggaactcaggcgccctgaccagcggcgtgcacaccttcccggctgtcctacagtcctcaggactctactccctcagcagcgtggtgaccgtgccctccagcagcttgggcacgaagacctacacctgcaacgtagatcacaagcccagcaacaccaaggtggacaagagagttgagtccaaatatggtcccccatgcccaccatgcccagcacctgagttcgaggggggaccatcagtcttcctgttccccccaaaacccaaggacactctcatgatctcccggacccctgaggtcacgtgcgtggtggtggacgtgagccaggaagaccccgaggtccagttcaactggtacgtggatggcgtggaggtgcataatgccaagacaaagccgcgggaggagcagttcaacagcacgtaccgtgtggtcagcgtcctcaccgtcctgcaccaggactggctgaacggcaaggagtacaagtgcaaggtctccaacaaaggcctcccgtcctccatcgagaaaaccatctccaaagccaaagggcagccccgagagccacaggtgtacaccctgcccccatcccaggaggagatgaccaagaaccaggtcagcctgacctgcctggtcaaaggcttctaccccagcgacatcgccgtggagtgggagagcaatgggcagccggagaacaactacaagaccacgcctcccgtgctggactccgacggctccttcttcctctacagcaggctaaccgtggacaagagcaggtggcaggaggggaatgtcttctcatgctccgtgatgcatgaggctctgcacaaccactacacacagaagagcctctccctgtctctgggtaaatga

SEQ ID NO: 200 - protein, 606 aa, Artificial
  Synthetic construct of 281VL4-CH1(118-131/P127A)-281
MKHLWFFLLLVAAPRWVLSEVQLVQSGSELKKPGSSVKVSCKASGGTSRSFAISWVRQAPGQGLEWMGGIIPIFGPANYAQKFQGRVTITADESTSTAYMELSSLRSEDTAVYYCARHAIAMGWGVITTNYFDSWGQGTMVTVSSASTKGPSVFALAPCQVQLQESGPGLVKPSETLSLTCTVSGGSISGYYWSWIRQPPGKGLEWIGYIYYSGSTNYNPSLKSRVTISVDTSKNQFSLKLNSVTAADTAVYYCARAPLHGDYKWFHPWGQGTLVTVSSASTKGPSVFPLAPCSRSTSESTAALGCLVKDYFPEPVTVSWNSGALTSGVHTFPAVLQSSGLYSLSSVVTVPSSSLGTKTYTCNVDHKPSNTKVDKRVESKYGPPCPPCPAPEFEGGPSVFLFPPKPKDTLMISRTPEVTCVVVDVSQEDPEVQFNWYVDGVEVHNAKTKPREEQFNSTYRVVSVLTVLHQDWLNGKEYKCKVSNKGLPSSIEKTISKAKGQPREPQVYTLPPSQEEMTKNQVSLTCLVKGFYPSDIAVEWESNGQPENNYKTTPPVLDSDGSFFLYSRLTVDKSRWQEGNVFSCSVMHEALHNHYTQKSLSLSLGK

SEQ ID NO: 201 - DNA, 1821 bp, Artificial
  Synthetic construct of 281VL4-CH1(118-131/L128A)-281
atgaagcacctgtggttcttcctcctgctggtggcggctcccagatgggtcctgtccgaggtccagctggtgcagtctgggtctgagctgaagaagcctgggtcctcggtgaaggtctcctgcaaggcttctggaggcacctccaggagctttgctatcagctgggtgcgacaggcccctggacaaggacttgagtggatgggagggatcatccctatctttggtccagcaaactacgcacagaagttccagggcagagtcacgattaccgcggacgaatccacgagcacagcctacatggagctgagtagcctgagatctgaggacacggccgtgtattactgtgcgaggcacgctattgctatgggttggggagttattacaacgaactactttgactcctggggccaagggacaatggtcaccgtctcctcagctagcaccaaggggccatccgtcttccccgcggcgccctgccaggtgcagctgcaggagtcgggcccaggactggtgaagccttcggagaccctgtccctcacctgcactgtctctggtggctccatcagtggttactactggagctggatccggcagcccccagggaagggactggagtggattgggtatatctattacagtgggagcaccaactacaatccctccctcaagagtcgagtcaccatatcagtagacacgtccaagaaccagttctccctgaagctgaattctgtgaccgctgcggacacggccgtgtattactgtgcgagagcccccttgcacggtgactacaaatggttccacccctggggccagggaaccctggtcaccgtctcctcagctagcaccaaggggccatccgtcttccccctggcgccctgctccaggagcacctccgagagcacagccgccctgggctgcctggtcaaggactacttccccgaaccggtgacggtgtcgtggaactcaggcgccctgaccagcggcgtgcacaccttcccggctgtcctacagtcctcaggactctactccctcagcagcgtggtgaccgtgccctccagcagcttgggcacgaagacctacacctgcaacgtagatcacaagcccagcaacaccaaggtggacaagagagttgagtccaaatatggtcccccatgcccaccatgcccagcacctgagttcgaggggggaccatcagtcttcctgttccccccaaaacccaaggacactctcatgatctcccggacccctgaggtcacgtgcgtggtggtggacgtgagccaggaagaccccgaggtccagttcaactggtacgtggatggcgtggaggtgcataatgccaagacaaagccgcgggaggagcagttcaacagcacgtaccgtgtggtcagcgtcctcaccgtcctgcaccaggactggctgaacggcaaggagtacaagtgcaaggtctccaacaaaggcctcccgtcctccatcgagaaaaccatctccaaagccaaagggcagccccgagagccacaggtgtacaccctgcccccatcccaggaggagatgaccaagaaccaggtcagcctgacctgcctggtcaaaggcttctaccccagcgacatcgccgtggagtgggagagcaatgggcagccggagaacaactacaagaccacgcctcccgtgctggactccgacggctccttcttcctctacagcaggctaaccgtggacaagagcaggtggcaggaggggaatgtcttctcatgctccgtgatgcatgaggctctgcacaaccactacacacagaagagcctctccctgtctctgggtaaatga

SEQ ID NO: 202 - protein, 606 aa, Artificial
  Synthetic construct of 281VL4-CH1(118-131/L128A)-281
MKHLWFFLLLVAAPRWVLSEVQLVQSGSELKKPGSSVKVSCKASGGTSRSFAISWVRQAPGQGLEWMGGIIPIFGPANYAQKFQGRVTITADESTSTAYMELSSLRSEDTAVYYCARHAIAMGWGVITTNYFDSWGQGTMVTVSSASTKGPSVFPAAPCQVQLQESGPGLVKPSETLSLTCTVSGGSISGYYWSWIRQPPGKGLEWIGYIYYSGSTNYNPSLKSRVTISVDTSKNQFSLKLNSVTAADTAVYYCARAPLHGDYKWFHPWGQGTLVTVSSASTKGPSVFPLAPCSRSTSESTAALGCLVKDYFPEPVTVSWNSGALTSGVHTFPAVLQSSGLYSLSSVVTVPSSSLGTKTYTCNVDHKPSNTKVDKRVESKYGPPCPPCPAPEFEGGPSVFLFPPKPKDTLMISRTPEVTCVVVDVSQEDPEVQFNWYVDGVEVHNAKTKPREEQFNSTYRVVSVLTVLHQDWLNGKEYKCKVSNKGLPSSIEKTISKAKGQPREPQVYTLPPSQEEMTKNQVSLTCLVKGFYPSDIAVEWESNGQPENNYKTTPPVLDSDGSFFLYSRLTVDKSRWQEGNVFSCSVMHEALHNHYTQKSLSLSLGK

SEQ ID NO: 203 - DNA, 1821 bp, Artificial
  Synthetic construct of 281VL4-CH1(118-131/A129S)-281
atgaagcacctgtggttcttcctcctgctggtggcggctcccagatgggtcctgtccgaggtccagctggtgcagtctgggtctgagctgaagaagcctgggtcctcggtgaaggtctcctgcaaggcttctggaggcacctccaggagctttgctatcagctgggtgcgacaggcccctggacaaggacttgagtggatgggagggatcatccctatctttggtccagcaaactacgcacagaagttccagggcagagtcacgattaccgcggacgaatccacgagcacagcctacatggagctgagtagcctgagatctgaggacacggccgtgtattactgtgcgaggcacgctattgctatgggttggggagttattacaacgaactactttgactcctggggccaagggacaatggtcaccgtctcctcagctagcaccaaggggccatccgtcttccccctgtcgccctgccaggtgcagctgcaggagtcgggcccaggactggtgaagccttcggagaccctgtccctcacctgcactgtctctggtggctccatcagtggttactactggagctggatccggcagcccccagggaagggactggagtggattgggtatatctattacagtgggagcaccaactacaatccctccctcaagagtcgagtcaccatatcagtagacacgtccaagaaccagttctccctgaagctgaattctgtgaccgctgcggacacggccgtgtattactgtgcgagagcccccttgcacggtgactacaaatggttccacccctggggccagggaaccctggtcaccgtctcctcagctagcaccaaggggccatccgtcttccccctggcgccctgctccaggagcacctccgagagcacagccgccctgggctgcctggtcaaggactacttccccgaaccggtgacggtgtcgtggaactcaggcgccctgaccagcggcgtgcacaccttcccggctgtcctacagtcctcaggactctactccctcagcagcgtggtgaccgtgccctccagcagcttgggcacgaagacctacacctgcaacgtagatcacaagcccagcaacaccaaggtggacaagagagttgagtccaaatatggtcccccatgcccaccatgcccagcacctgagttcgaggggggaccatcagtcttcctgttccccccaaaacccaaggacactctcatgatctcccggacccctgaggtcacgtgcgtggtggtggacgtgagccaggaagaccccgaggtccagttcaactggtacgtggatggcgtggaggtgcataatgccaagacaaagccgcgggaggagcagttcaacagcacgtaccgtgtggtcagcgtcctcaccgtcctgcaccaggactggctgaacggcaaggagtacaagtgcaaggtctccaacaaaggcctcccgtcctccatcgagaaaaccatctccaaagccaaagggcagccccgagagccacaggtgtacaccctgcccccatcccaggaggagatgaccaagaaccaggtcagcctgacctgcctggtcaaaggcttctaccccagcgacatcgccgtggagtgggagagcaatgggcagccggagaacaactacaagaccacgcctcccgtgctggactccgacggctccttcttcctctacagcaggctaaccgtggacaagagcaggtggcaggaggggaatgtcttctcatgctccgtgatgcatgaggctctgcacaaccactacacacagaagagcctctccctgtctctgggtaaatga

SEQ ID NO: 204 - protein, 606 aa, Artificial
  Synthetic construct of 281VL4-CH1(118-131/A129S)-281
MKHLWFFLLLVAAPRWVLSEVQLVQSGSELKKPGSSVKVSCKASGGTSRSFAISWVRQAPGQGLEWMGGIIPIFGPANYAQKFQGRVTITADESTSTAYMELSSLRSEDTAVYYCARHAIAMGWGVITTNYFDSWGQGTMVTVSSASTKGPSVFPLSPCQVQLQESGPGLVKPSETLSLTCTVSGGSISGYYWSWIRQPPGKGLEWIGYIYYSGSTNYNPSLKSRVTISVDTSKNQFSLKLNSVTAADTAVYYCARAPLHGDYKWFHPWGQGTLVTVSSASTKGPSVFPLAPCSRSTSESTAALGCLVKDYFPEPVTVSWNSGALTSGVHTFPAVLQSSGLYSLSSVVTVPSSSLGTKTYTCNVDHKPSNTKVDKRVESKYGPPCPPCPAPEFEGGPSVFLFPPKPKDTLMISRTPEVTCVVVDVSQEDPEVQFNWYVDGVEVHNAKTKPREEQFNSTYRVVSVLTVLHQDWLNGKEYKCKVSNKGLPSSIEKTISKAKGQPREPQVYTLPPSQEEMTKNQVSLTCLVKGFYPSDIAVEWESNGQPENNYKTTPPVLDSDGSFFLYSRLTVDKSRWQEGNVFSCSVMHEALHNHYTQKSLSLSLGK

SEQ ID NO: 205 - DNA, 1821 bp, Artificial
  Synthetic construct of 281VL4-CH1(118-131/P130A)-281
atgaagcacctgtggttcttcctcctgctggtggcggctcccagatgggtcctgtccgaggtccagctggtgcagtctgggtctgagctgaagaagcctgggtcctcggtgaaggtctcctgcaaggcttctggaggcacctccaggagctttgctatcagctgggtgcgacaggcccctggacaaggacttgagtggatgggagggatcatccctatctttggtccagcaaactacgcacagaagttccagggcagagtcacgattaccgcggacgaatccacgagcacagcctacatggagctgagtagcctgagatctgaggacacggccgtgtattactgtgcgaggcacgctattgctatgggttggggagttattacaacgaactactttgactcctggggccaagggacaatggtcaccgtctcctcagctagcaccaaggggccatccgtcttccccctggcggcctgccaggtgcagctgcaggagtcgggcccaggactggtgaagccttcggagaccctgtccctcacctgcactgtctctggtggctccatcagtggttactactggagctggatccggcagcccccagggaagggactggagtggattgggtatatctattacagtgggagcaccaactacaatccctccctcaagagtcgagtcaccatatcagtagacacgtccaagaaccagttctccctgaagctgaattctgtgaccgctgcggacacggccgtgtattactgtgcgagagcccccttgcacggtgactacaaatggttccacccctggggccagggaaccctggtcaccgtctcctcagctagcaccaaggggccatccgtcttccccctggcgccctgctccaggagcacctccgagagcacagccgccctgggctgcctggtcaaggactacttccccgaaccggtgacggtgtcgtggaactcaggcgccctgaccagcggcgtgcacaccttcccggctgtcctacagtcctcaggactctactccctcagcagcgtggtgaccgtgccctccagcagcttgggcacgaagacctacacctgcaacgtagatcacaagcccagcaacaccaaggtggacaagagagttgagtccaaatatggtcccccatgcccaccatgcccagcacctgagttcgaggggggaccatcagtcttcctgttccccccaaaacccaaggacactctcatgatctcccggacccctgaggtcacgtgcgtggtggtggacgtgagccaggaagaccccgaggtccagttcaactggtacgtggatggcgtggaggtgcataatgccaagacaaagccgcgggaggagcagttcaacagcacgtaccgtgtggtcagcgtcctcaccgtcctgcaccaggactggctgaacggcaaggagtacaagtgcaaggtctccaacaaaggcctcccgtcctccatcgagaaaaccatctccaaagccaaagggcagccccgagagccacaggtgtacaccctgcccccatcccaggaggagatgaccaagaaccaggtcagcctgacctgcctggtcaaaggcttctaccccagcgacatcgccgtggagtgggagagcaatgggcagccggagaacaactacaagaccacgcctcccgtgctggactccgacggctccttcttcctctacagcaggctaaccgtggacaagagcaggtggcaggaggggaatgtcttctcatgctccgtgatgcatgaggctctgcacaaccactacacacagaagagcctctccctgtctctgggtaaatga

SEQ ID NO: 206 - protein, 606 aa, Artificial
  Synthetic construct of 281VL4-CH1(118-131/P130A)-281
MKHLWFFLLLVAAPRWVLSEVQLVQSGSELKKPGSSVKVSCKASGGTSRSFAISWVRQAPGQGLEWMGGIIPIFGPANYAQKFQGRVTITADESTSTAYMELSSLRSEDTAVYYCARHAIAMGWGVITTNYFDSWGQGTMVTVSSASTKGPSVFPLAACQVQLQESGPGLVKPSETLSLTCTVSGGSISGYYWSWIRQPPGKGLEWIGYIYYSGSTNYNPSLKSRVTISVDTSKNQFSLKLNSVTAADTAVYYCARAPLHGDYKWFHPWGQGTLVTVSSASTKGPSVFPLAPCSRSTSESTAALGCLVKDYFPEPVTVSWNSGALTSGVHTFPAVLQSSGLYSLSSVVTVPSSSLGTKTYTCNVDHKPSNTKVDKRVESKYGPPCPPCPAPEFEGGPSVFLFPPKPKDTLMISRTPEVTCVVVDVSQEDPEVQFNWYVDGVEVHNAKTKPREEQFNSTYRVVSVLTVLHQDWLNGKEYKCKVSNKGLPSSIEKTISKAKGQPREPQVYTLPPSQEEMTKNQVSLTCLVKGFYPSDIAVEWESNGQPENNYKTTPPVLDSDGSFFLYSRLTVDKSRWQEGNVFSCSVMHEALHNHYTQKSLSLSLGK

SEQ ID NO: 207 - DNA, 1821 bp, Artificial
  Synthetic construct of 281VL4-CH1(IGHA)-281
atgaagcacctgtggttcttcctcctgctggtggcggctcccagatgggtcctgtccgaggtccagctggtgcagtctgggtctgagctgaagaagcctgggtcctcggtgaaggtctcctgcaaggcttctggaggcacctccaggagctttgctatcagctgggtgcgacaggcccctggacaaggacttgagtggatgggagggatcatccctatctttggtccagcaaactacgcacagaagttccagggcagagtcacgattaccgcggacgaatccacgagcacagcctacatggagctgagtagcctgagatctgaggacacggccgtgtattactgtgcgaggcacgctattgctatgggttggggagttattacaacgaactactttgactcctggggccaagggacaatggtcaccgtctcctcagcatccccgaccagccccaaggtcttcccgctgagcctctgccaggtgcagctgcaggagtcgggcccaggactggtgaagccttcggagaccctgtccctcacctgcactgtctctggtggctccatcagtggttactactggagctggatccggcagcccccagggaagggactggagtggattgggtatatctattacagtgggagcaccaactacaatccctccctcaagagtcgagtcaccatatcagtagacacgtccaagaaccagttctccctgaagctgaattctgtgaccgctgcggacacggccgtgtattactgtgcgagagcccccttgcacggtgactacaaatggttccacccctggggccagggaaccctggtcaccgtctcctcagctagcaccaaggggccatccgtcttccccctggcgccctgctccaggagcacctccgagagcacagccgccctgggctgcctggtcaaggactacttccccgaaccggtgacggtgtcgtggaactcaggcgccctgaccagcggcgtgcacaccttcccggctgtcctacagtcctcaggactctactccctcagcagcgtggtgaccgtgccctccagcagcttgggcacgaagacctacacctgcaacgtagatcacaagcccagcaacaccaaggtggacaagagagttgagtccaaatatggtcccccatgcccaccatgcccagcacctgagttcgaggggggaccatcagtcttcctgttccccccaaaacccaaggacactctcatgatctcccggacccctgaggtcacgtgcgtggtggtggacgtgagccaggaagaccccgaggtccagttcaactggtacgtggatggcgtggaggtgcataatgccaagacaaagccgcgggaggagcagttcaacagcacgtaccgtgtggtcagcgtcctcaccgtcctgcaccaggactggctgaacggcaaggagtacaagtgcaaggtctccaacaaaggcctcccgtcctccatcgagaaaaccatctccaaagccaaagggcagccccgagagccacaggtgtacaccctgcccccatcccaggaggagatgaccaagaaccaggtcagcctgacctgcctggtcaaaggcttctaccccagcgacatcgccgtggagtgggagagcaatgggcagccggagaacaactacaagaccacgcctcccgtgctggactccgacggctccttcttcctctacagcaggctaaccgtggacaagagcaggtggcaggaggggaatgtcttctcatgctccgtgatgcatgaggctctgcacaaccactacacacagaagagcctctccctgtctctgggtaaatga

SEQ ID NO: 208 - protein, 606 aa, Artificial
  Synthetic construct of 281VL4-CH1(IGHA)-281
MKHLWFFLLLVAAPRWVLSEVQLVQSGSELKKPGSSVKVSCKASGGTSRSFAISWVRQAPGQGLEWMGGIIPIFGPANYAQKFQGRVTITADESTSTAYMELSSLRSEDTAVYYCARHAIAMGWGVITTNYFDSWGQGTMVTVSSASPTSPKVFPLSLCQVQLQESGPGLVKPSETLSLTCTVSGGSISGYYWSWIRQPPGKGLEWIGYIYYSGSTNYNPSLKSRVTISVDTSKNQFSLKLNSVTAADTAVYYCARAPLHGDYKWFHPWGQGTLVTVSSASTKGPSVFPLAPCSRSTSESTAALGCLVKDYFPEPVTVSWNSGALTSGVHTFPAVLQSSGLYSLSSVVTVPSSSLGTKTYTCNVDHKPSNTKVDKRVESKYGPPCPPCPAPEFEGGPSVFLFPPKPKDTLMISRTPEVTCVVVDVSQEDPEVQFNWYVDGVEVHNAKTKPREEQFNSTYRVVSVLTVLHQDWLNGKEYKCKVSNKGLPSSIEKTISKAKGQPREPQVYTLPPSQEEMTKNQVSLTCLVKGFYPSDIAVEWESNGQPENNYKTTPPVLDSDGSFFLYSRLTVDKSRWQEGNVFSCSVMHEALHNHYTQKSLSLSLGK

SEQ ID NO: 209 - DNA, 1821 bp, Artificial
  Synthetic construct of 281VL4-CH1(IGHD(14))-281
atgaagcacctgtggttcttcctcctgctggtggcggctcccagatgggtcctgtccgaggtccagctggtgcagtctgggtctgagctgaagaagcctgggtcctcggtgaaggtctcctgcaaggcttctggaggcacctccaggagctttgctatcagctgggtgcgacaggcccctggacaaggacttgagtggatgggagggatcatccctatctttggtccagcaaactacgcacagaagttccagggcagagtcacgattaccgcggacgaatccacgagcacagcctacatggagctgagtagcctgagatctgaggacacggccgtgtattactgtgcgaggcacgctattgctatgggttggggagttattacaacgaactactttgactcctggggccaagggacaatggtcaccgtctcctcagcacccaccaaggctccggatgtgttccccatcatatcatgccaggtgcagctgcaggagtcgggcccaggactggtgaagccttcggagaccctgtccctcacctgcactgtctctggtggctccatcagtggttactactggagctggatccggcagcccccagggaagggactggagtggattgggtatatctattacagtgggagcaccaactacaatccctccctcaagagtcgagtcaccatatcagtagacacgtccaagaaccagttctccctgaagctgaattctgtgaccgctgcggacacggccgtgtattactgtgcgagagcccccttgcacggtgactacaaatggttccacccctggggccagggaaccctggtcaccgtctcctcagctagcaccaaggggccatccgtcttccccctggcgccctgctccaggagcacctccgagagcacagccgccctgggctgcctggtcaaggactacttccccgaaccggtgacggtgtcgtggaactcaggcgccctgaccagcggcgtgcacaccttcccggctgtcctacagtcctcaggactctactccctcagcagcgtggtgaccgtgccctccagcagcttgggcacgaagacctacacctgcaacgtagatcacaagcccagcaacaccaaggtggacaagagagttgagtccaaatatggtcccccatgcccaccatgcccagcacctgagttcgaggggggaccatcagtcttcctgttccccccaaaacccaaggacactctcatgatctcccggacccctgaggtcacgtgcgtggtggtggacgtgagccaggaagaccccgaggtccagttcaactggtacgtggatggcgtggaggtgcataatgccaagacaaagccgcgggaggagcagttcaacagcacgtaccgtgtggtcagcgtcctcaccgtcctgcaccaggactggctgaacggcaaggagtacaagtgcaaggtctccaacaaaggcctcccgtcctccatcgagaaaaccatctccaaagccaaagggcagccccgagagccacaggtgtacaccctgcccccatcccaggaggagatgaccaagaaccaggtcagcctgacctgcctggtcaaaggcttctaccccagcgacatcgccgtggagtgggagagcaatgggcagccggagaacaactacaagaccacgcctcccgtgctggactccgacggctccttcttcctctacagcaggctaaccgtggacaagagcaggtggcaggaggggaatgtcttctcatgctccgtgatgcatgaggctctgcacaaccactacacacagaagagcctctccctgtctctgggtaaatga

SEQ ID NO: 210 - protein, 606 aa, Artificial
  Synthetic construct of 281VL4-CH1(IGHD(14))-281
MKHLWFFLLLVAAPRWVLSEVQLVQSGSELKKPGSSVKVSCKASGGTSRSFAISWVRQAPGQGLEWMGGIIPIFGPANYAQKFQGRVTITADESTSTAYMELSSLRSEDTAVYYCARHAIAMGWGVITTNYFDSWGQGTMVTVSSAPTKAPDVFPIISCQVQLQESGPGLVKPSETLSLTCTVSGGSISGYYWSWIRQPPGKGLEWIGYIYYSGSTNYNPSLKSRVTISVDTSKNQFSLKLNSVTAADTAVYYCARAPLHGDYKWFHPWGQGTLVTVSSASTKGPSVFPLAPCSRSTSESTAALGCLVKDYFPEPVTVSWNSGALTSGVHTFPAVLQSSGLYSLSSVVTVPSSSLGTKTYTCNVDHKPSNTKVDKRVESKYGPPCPPCPAPEFEGGPSVFLFPPKPKDTLMISRTPEVTCVVVDVSQEDPEVQFNWYVDGVEVHNAKTKPREEQFNSTYRVVSVLTVLHQDWLNGKEYKCKVSNKGLPSSIEKTISKAKGQPREPQVYTLPPSQEEMTKNQVSLTCLVKGFYPSDIAVEWESNGQPENNYKTTPPVLDSDGSFFLYSRLTVDKSRWQEGNVFSCSVMHEALHNHYTQKSLSLSLGK

SEQ ID NO: 211 - DNA, 1824 bp, Artificial
  Synthetic construct of 281VL4-CH1(IGHD(15))-281
atgaagcacctgtggttcttcctcctgctggtggcggctcccagatgggtcctgtccgaggtccagctggtgcagtctgggtctgagctgaagaagcctgggtcctcggtgaaggtctcctgcaaggcttctggaggcacctccaggagctttgctatcagctgggtgcgacaggcccctggacaaggacttgagtggatgggagggatcatccctatctttggtccagcaaactacgcacagaagttccagggcagagtcacgattaccgcggacgaatccacgagcacagcctacatggagctgagtagcctgagatctgaggacacggccgtgtattactgtgcgaggcacgctattgctatgggttggggagttattacaacgaactactttgactcctggggccaagggacaatggtcaccgtctcctcagcacccaccaaggctccggatgtgttccccatcatatcagggtgccaggtgcagctgcaggagtcgggcccaggactggtgaagccttcggagaccctgtccctcacctgcactgtctctggtggctccatcagtggttactactggagctggatccggcagcccccagggaagggactggagtggattgggtatatctattacagtgggagcaccaactacaatccctccctcaagagtcgagtcaccatatcagtagacacgtccaagaaccagttctccctgaagctgaattctgtgaccgctgcggacacggccgtgtattactgtgcgagagcccccttgcacggtgactacaaatggttccacccctggggccagggaaccctggtcaccgtctcctcagctagcaccaaggggccatccgtcttccccctggcgccctgctccaggagcacctccgagagcacagccgccctgggctgcctggtcaaggactacttccccgaaccggtgacggtgtcgtggaactcaggcgccctgaccagcggcgtgcacaccttcccggctgtcctacagtcctcaggactctactccctcagcagcgtggtgaccgtgccctccagcagcttgggcacgaagacctacacctgcaacgtagatcacaagcccagcaacaccaaggtggacaagagagttgagtccaaatatggtcccccatgcccaccatgcccagcacctgagttcgaggggggaccatcagtcttcctgttccccccaaaacccaaggacactctcatgatctcccggacccctgaggtcacgtgcgtggtggtggacgtgagccaggaagaccccgaggtccagttcaactggtacgtggatggcgtggaggtgcataatgccaagacaaagccgcgggaggagcagttcaacagcacgtaccgtgtggtcagcgtcctcaccgtcctgcaccaggactggctgaacggcaaggagtacaagtgcaaggtctccaacaaaggcctcccgtcctccatcgagaaaaccatctccaaagccaaagggcagccccgagagccacaggtgtacaccctgcccccatcccaggaggagatgaccaagaaccaggtcagcctgacctgcctggtcaaaggcttctaccccagcgacatcgccgtggagtgggagagcaatgggcagccggagaacaactacaagaccacgcctcccgtgctggactccgacggctccttcttcctctacagcaggctaaccgtggacaagagcaggtggcaggaggggaatgtcttctcatgctccgtgatgcatgaggctctgcacaaccactacacacagaagagcctctccctgtctctgggtaaatga

SEQ ID NO: 212 - protein, 607 aa, Artificial
  Synthetic construct of 281VL4-CH1(IGHD(15))-281
MKHLWFFLLLVAAPRWVLSEVQLVQSGSELKKPGSSVKVSCKASGGTSRSFAISWVRQAPGQGLEWMGGIIPIFGPANYAQKFQGRVTITADESTSTAYMELSSLRSEDTAVYYCARHAIAMGWGVITTNYFDSWGQGTMVTVSSAPTKAPDVFPIISGCQVQLQESGPGLVKPSETLSLTCTVSGGSISGYYWSWIRQPPGKGLEWIGYIYYSGSTNYNPSLKSRVTISVDTSKNQFSLKLNSVTAADTAVYYCARAPLHGDYKWFHPWGQGTLVTVSSASTKGPSVFPLAPCSRSTSESTAALGCLVKDYFPEPVTVSWNSGALTSGVHTFPAVLQSSGLYSLSSVVTVPSSSLGTKTYTCNVDHKPSNTKVDKRVESKYGPPCPPCPAPEFEGGPSVFLFPPKPKDTLMISRTPEVTCVVVDVSQEDPEVQFNWYVDGVEVHNAKTKPREEQFNSTYRVVSVLTVLHQDWLNGKEYKCKVSNKGLPSSIEKTISKAKGQPREPQVYTLPPSQEEMTKNQVSLTCLVKGFYPSDIAVEWESNGQPENNYKTTPPVLDSDGSFFLYSRLTVDKSRWQEGNVFSCSVMHEALHNHYTQKSLSLSLGK

SEQ ID NO: 213 - DNA, 1821 bp, Artificial
  Synthetic construct of 281VL4-CH1(IGHE)-281
atgaagcacctgtggttcttcctcctgctggtggcggctcccagatgggtcctgtccgaggtccagctggtgcagtctgggtctgagctgaagaagcctgggtcctcggtgaaggtctcctgcaaggcttctggaggcacctccaggagctttgctatcagctgggtgcgacaggcccctggacaaggacttgagtggatgggagggatcatccctatctttggtccagcaaactacgcacagaagttccagggcagagtcacgattaccgcggacgaatccacgagcacagcctacatggagctgagtagcctgagatctgaggacacggccgtgtattactgtgcgaggcacgctattgctatgggttggggagttattacaacgaactactttgactcctggggccaagggacaatggtcaccgtctcctcagcctccacacagagcccatccgtcttccccttgacccgctgccaggtgcagctgcaggagtcgggcccaggactggtgaagccttcggagaccctgtccctcacctgcactgtctctggtggctccatcagtggttactactggagctggatccggcagcccccagggaagggactggagtggattgggtatatctattacagtgggagcaccaactacaatccctccctcaagagtcgagtcaccatatcagtagacacgtccaagaaccagttctccctgaagctgaattctgtgaccgctgcggacacggccgtgtattactgtgcgagagcccccttgcacggtgactacaaatggttccacccctggggccagggaaccctggtcaccgtctcctcagctagcaccaaggggccatccgtcttccccctggcgccctgctccaggagcacctccgagagcacagccgccctgggctgcctggtcaaggactacttccccgaaccggtgacggtgtcgtggaactcaggcgccctgaccagcggcgtgcacaccttcccggctgtcctacagtcctcaggactctactccctcagcagcgtggtgaccgtgccctccagcagcttgggcacgaagacctacacctgcaacgtagatcacaagcccagcaacaccaaggtggacaagagagttgagtccaaatatggtcccccatgcccaccatgcccagcacctgagttcgaggggggaccatcagtcttcctgttccccccaaaacccaaggacactctcatgatctcccggacccctgaggtcacgtgcgtggtggtggacgtgagccaggaagaccccgaggtccagttcaactggtacgtggatggcgtggaggtgcataatgccaagacaaagccgcgggaggagcagttcaacagcacgtaccgtgtggtcagcgtcctcaccgtcctgcaccaggactggctgaacggcaaggagtacaagtgcaaggtctccaacaaaggcctcccgtcctccatcgagaaaaccatctccaaagccaaagggcagccccgagagccacaggtgtacaccctgcccccatcccaggaggagatgaccaagaaccaggtcagcctgacctgcctggtcaaaggcttctaccccagcgacatcgccgtggagtgggagagcaatgggcagccggagaacaactacaagaccacgcctcccgtgctggactccgacggctccttcttcctctacagcaggctaaccgtggacaagagcaggtggcaggaggggaatgtcttctcatgctccgtgatgcatgaggctctgcacaaccactacacacagaagagcctctccctgtctctgggtaaatga

SEQ ID NO: 214 - protein, 606 aa, Artificial
  Synthetic construct of 281VL4-CH1(IGHE)-281
MKHLWFFLLLVAAPRWVLSEVQLVQSGSELKKPGSSVKVSCKASGGTSRSFAISWVRQAPGQGLEWMGGIIPIFGPANYAQKFQGRVTITADESTSTAYMELSSLRSEDTAVYYCARHAIAMGWGVITTNYFDSWGQGTMVTVSSASTQSPSVFPLTRCQVQLQESGPGLVKPSETLSLTCTVSGGSISGYYWSWIRQPPGKGLEWIGYIYYSGSTNYNPSLKSRVTISVDTSKNQFSLKLNSVTAADTAVYYCARAPLHGDYKWFHPWGQGTLVTVSSASTKGPSVFPLAPCSRSTSESTAALGCLVKDYFPEPVTVSWNSGALTSGVHTFPAVLQSSGLYSLSSVVTVPSSSLGTKTYTCNVDHKPSNTKVDKRVESKYGPPCPPCPAPEFEGGPSVFLFPPKPKDTLMISRTPEVTCVVVDVSQEDPEVQFNWYVDGVEVHNAKTKPREEQFNSTYRVVSVLTVLHQDWLNGKEYKCKVSNKGLPSSIEKTISKAKGQPREPQVYTLPPSQEEMTKNQVSLTCLVKGFYPSDIAVEWESNGQPENNYKTTPPVLDSDGSFFLYSRLTVDKSRWQEGNVFSCSVMHEALHNHYTQKSLSLSLGK

SEQ ID NO: 215 - DNA, 1821 bp, Artificial
  Synthetic construct of 281VL4-CH1(IGHGP)-281
atgaagcacctgtggttcttcctcctgctggtggcggctcccagatgggtcctgtccgaggtccagctggtgcagtctgggtctgagctgaagaagcctgggtcctcggtgaaggtctcctgcaaggcttctggaggcacctccaggagctttgctatcagctgggtgcgacaggcccctggacaaggacttgagtggatgggagggatcatccctatctttggtccagcaaactacgcacagaagttccagggcagagtcacgattaccgcggacgaatccacgagcacagcctacatggagctgagtagcctgagatctgaggacacggccgtgtattactgtgcgaggcacgctattgctatgggttggggagttattacaacgaactactttgactcctggggccaagggacaatggtcaccgtctcctcagcctccaccaagggcccatcggtcttccccctggtgccctgccaggtgcagctgcaggagtcgggcccaggactggtgaagccttcggagaccctgtccctcacctgcactgtctctggtggctccatcagtggttactactggagctggatccggcagcccccagggaagggactggagtggattgggtatatctattacagtgggagcaccaactacaatccctccctcaagagtcgagtcaccatatcagtagacacgtccaagaaccagttctccctgaagctgaattctgtgaccgctgcggacacggccgtgtattactgtgcgagagcccccttgcacggtgactacaaatggttccacccctggggccagggaaccctggtcaccgtctcctcagctagcaccaaggggccatccgtcttccccctggcgccctgctccaggagcacctccgagagcacagccgccctgggctgcctggtcaaggactacttccccgaaccggtgacggtgtcgtggaactcaggcgccctgaccagcggcgtgcacaccttcccggctgtcctacagtcctcaggactctactccctcagcagcgtggtgaccgtgccctccagcagcttgggcacgaagacctacacctgcaacgtagatcacaagcccagcaacaccaaggtggacaagagagttgagtccaaatatggtcccccatgcccaccatgcccagcacctgagttcgaggggggaccatcagtcttcctgttccccccaaaacccaaggacactctcatgatctcccggacccctgaggtcacgtgcgtggtggtggacgtgagccaggaagaccccgaggtccagttcaactggtacgtggatggcgtggaggtgcataatgccaagacaaagccgcgggaggagcagttcaacagcacgtaccgtgtggtcagcgtcctcaccgtcctgcaccaggactggctgaacggcaaggagtacaagtgcaaggtctccaacaaaggcctcccgtcctccatcgagaaaaccatctccaaagccaaagggcagccccgagagccacaggtgtacaccctgcccccatcccaggaggagatgaccaagaaccaggtcagcctgacctgcctggtcaaaggcttctaccccagcgacatcgccgtggagtgggagagcaatgggcagccggagaacaactacaagaccacgcctcccgtgctggactccgacggctccttcttcctctacagcaggctaaccgtggacaagagcaggtggcaggaggggaatgtcttctcatgctccgtgatgcatgaggctctgcacaaccactacacacagaagagcctctccctgtctctgggtaaatga

SEQ ID NO: 216 - protein, 606 aa, Artificial
  Synthetic construct of 281VL4-CH1(IGHGP)-281
MKHLWFFLLLVAAPRWVLSEVQLVQSGSELKKPGSSVKVSCKASGGTSRSFAISWVRQAPGQGLEWMGGIIPIFGPANYAQKFQGRVTITADESTSTAYMELSSLRSEDTAVYYCARHAIAMGWGVITTNYFDSWGQGTMVTVSSASTKGPSVFPLVPCQVQLQESGPGLVKPSETLSLTCTVSGGSISGYYWSWIRQPPGKGLEWIGYIYYSGSTNYNPSLKSRVTISVDTSKNQFSLKLNSVTAADTAVYYCARAPLHGDYKWFHPWGQGTLVTVSSASTKGPSVFPLAPCSRSTSESTAALGCLVKDYFPEPVTVSWNSGALTSGVHTFPAVLQSSGLYSLSSVVTVPSSSLGTKTYTCNVDHKPSNTKVDKRVESKYGPPCPPCPAPEFEGGPSVFLFPPKPKDTLMISRTPEVTCVVVDVSQEDPEVQFNWYVDGVEVHNAKTKPREEQFNSTYRVVSVLTVLHQDWLNGKEYKCKVSNKGLPSSIEKTISKAKGQPREPQVYTLPPSQEEMTKNQVSLTCLVKGFYPSDIAVEWESNGQPENNYKTTPPVLDSDGSFFLYSRLTVDKSRWQEGNVFSCSVMHEALHNHYTQKSLSLSLGK

SEQ ID NO: 217 - DNA, 1821 bp, Artificial
  Synthetic construct of 281VL4-CH1(IGHM)-281
atgaagcacctgtggttcttcctcctgctggtggcggctcccagatgggtcctgtccgaggtccagctggtgcagtctgggtctgagctgaagaagcctgggtcctcggtgaaggtctcctgcaaggcttctggaggcacctccaggagctttgctatcagctgggtgcgacaggcccctggacaaggacttgagtggatgggagggatcatccctatctttggtccagcaaactacgcacagaagttccagggcagagtcacgattaccgcggacgaatccacgagcacagcctacatggagctgagtagcctgagatctgaggacacggccgtgtattactgtgcgaggcacgctattgctatgggttggggagttattacaacgaactactttgactcctggggccaagggacaatggtcaccgtctcctcagggagtgcatccgccccaacccttttccccctcgtctcctgtcaggtgcagctgcaggagtcgggcccaggactggtgaagccttcggagaccctgtccctcacctgcactgtctctggtggctccatcagtggttactactggagctggatccggcagcccccagggaagggactggagtggattgggtatatctattacagtgggagcaccaactacaatccctccctcaagagtcgagtcaccatatcagtagacacgtccaagaaccagttctccctgaagctgaattctgtgaccgctgcggacacggccgtgtattactgtgcgagagcccccttgcacggtgactacaaatggttccacccctggggccagggaaccctggtcaccgtctcctcagctagcaccaaggggccatccgtcttccccctggcgccctgctccaggagcacctccgagagcacagccgccctgggctgcctggtcaaggactacttccccgaaccggtgacggtgtcgtggaactcaggcgccctgaccagcggcgtgcacaccttcccggctgtcctacagtcctcaggactctactccctcagcagcgtggtgaccgtgccctccagcagcttgggcacgaagacctacacctgcaacgtagatcacaagcccagcaacaccaaggtggacaagagagttgagtccaaatatggtcccccatgcccaccatgcccagcacctgagttcgaggggggaccatcagtcttcctgttccccccaaaacccaaggacactctcatgatctcccggacccctgaggtcacgtgcgtggtggtggacgtgagccaggaagaccccgaggtccagttcaactggtacgtggatggcgtggaggtgcataatgccaagacaaagccgcgggaggagcagttcaacagcacgtaccgtgtggtcagcgtcctcaccgtcctgcaccaggactggctgaacggcaaggagtacaagtgcaaggtctccaacaaaggcctcccgtcctccatcgagaaaaccatctccaaagccaaagggcagccccgagagccacaggtgtacaccctgcccccatcccaggaggagatgaccaagaaccaggtcagcctgacctgcctggtcaaaggcttctaccccagcgacatcgccgtggagtgggagagcaatgggcagccggagaacaactacaagaccacgcctcccgtgctggactccgacggctccttcttcctctacagcaggctaaccgtggacaagagcaggtggcaggaggggaatgtcttctcatgctccgtgatgcatgaggctctgcacaaccactacacacagaagagcctctccctgtctctgggtaaatga

SEQ ID NO: 218 - protein, 606 aa, Artificial
  Synthetic construct of 281VL4-CH1(IGHM)-281
MKHLWFFLLLVAAPRWVLSEVQLVQSGSELKKPGSSVKVSCKASGGTSRSFAISWVRQAPGQGLEWMGGIIPIFGPANYAQKFQGRVTITADESTSTAYMELSSLRSEDTAVYYCARHAIAMGWGVITTNYFDSWGQGTMVTVSSGSASAPTLFPLVSCQVQLQESGPGLVKPSETLSLTCTVSGGSISGYYWSWIRQPPGKGLEWIGYIYYSGSTNYNPSLKSRVTISVDTSKNQFSLKLNSVTAADTAVYYCARAPLHGDYKWFHPWGQGTLVTVSSASTKGPSVFPLAPCSRSTSESTAALGCLVKDYFPEPVTVSWNSGALTSGVHTFPAVLQSSGLYSLSSVVTVPSSSLGTKTYTCNVDHKPSNTKVDKRVESKYGPPCPPCPAPEFEGGPSVFLFPPKPKDTLMISRTPEVTCVVVDVSQEDPEVQFNWYVDGVEVHNAKTKPREEQFNSTYRVVSVLTVLHQDWLNGKEYKCKVSNKGLPSSIEKTISKAKGQPREPQVYTLPPSQEEMTKNQVSLTCLVKGFYPSDIAVEWESNGQPENNYKTTPPVLDSDGSFFLYSRLTVDKSRWQEGNVFSCSVMHEALHNHYTQKSLSLSLGK

SEQ ID NO: 219 - DNA, 1821 bp, Artificial
  Synthetic construct of 281VL4-CH1(118-131/A118G)-281
atgaagcacctgtggttcttcctcctgctggtggcggctcccagatgggtcctgtccgaggtccagctggtgcagtctgggtctgagctgaagaagcctgggtcctcggtgaaggtctcctgcaaggcttctggaggcacctccaggagctttgctatcagctgggtgcgacaggcccctggacaaggacttgagtggatgggagggatcatccctatctttggtccagcaaactacgcacagaagttccagggcagagtcacgattaccgcggacgaatccacgagcacagcctacatggagctgagtagcctgagatctgaggacacggccgtgtattactgtgcgaggcacgctattgctatgggttggggagttattacaacgaactactttgactcctggggccaagggacaatggtcaccgtctcctcaggcagcaccaaggggccatccgtcttccccctggcgccctgccaggtgcagctgcaggagtcgggcccaggactggtgaagccttcggagaccctgtccctcacctgcactgtctctggtggctccatcagtggttactactggagctggatccggcagcccccagggaagggactggagtggattgggtatatctattacagtgggagcaccaactacaatccctccctcaagagtcgagtcaccatatcagtagacacgtccaagaaccagttctccctgaagctgaattctgtgaccgctgcggacacggccgtgtattactgtgcgagagcccccttgcacggtgactacaaatggttccacccctggggccagggaaccctggtcaccgtctcctcagctagcaccaaggggccatccgtcttccccctggcgccctgctccaggagcacctccgagagcacagccgccctgggctgcctggtcaaggactacttccccgaaccggtgacggtgtcgtggaactcaggcgccctgaccagcggcgtgcacaccttcccggctgtcctacagtcctcaggactctactccctcagcagcgtggtgaccgtgccctccagcagcttgggcacgaagacctacacctgcaacgtagatcacaagcccagcaacaccaaggtggacaagagagttgagtccaaatatggtcccccatgcccaccatgcccagcacctgagttcgaggggggaccatcagtcttcctgttccccccaaaacccaaggacactctcatgatctcccggacccctgaggtcacgtgcgtggtggtggacgtgagccaggaagaccccgaggtccagttcaactggtacgtggatggcgtggaggtgcataatgccaagacaaagccgcgggaggagcagttcaacagcacgtaccgtgtggtcagcgtcctcaccgtcctgcaccaggactggctgaacggcaaggagtacaagtgcaaggtctccaacaaaggcctcccgtcctccatcgagaaaaccatctccaaagccaaagggcagccccgagagccacaggtgtacaccctgcccccatcccaggaggagatgaccaagaaccaggtcagcctgacctgcctggtcaaaggcttctaccccagcgacatcgccgtggagtgggagagcaatgggcagccggagaacaactacaagaccacgcctcccgtgctggactccgacggctccttcttcctctacagcaggctaaccgtggacaagagcaggtggcaggaggggaatgtcttctcatgctccgtgatgcatgaggctctgcacaaccactacacacagaagagcctctccctgtctctgggtaaatga

SEQ ID NO: 220 - protein, 606 aa, Artificial
  Synthetic construct of 281VL4-CH1(118-131/A118G)-281
MKHLWFFLLLVAAPRWVLSEVQLVQSGSELKKPGSSVKVSCKASGGTSRSFAISWVRQAPGQGLEWMGGIIPIFGPANYAQKFQGRVTITADESTSTAYMELSSLRSEDTAVYYCARHAIAMGWGVITTNYFDSWGQGTMVTVSSGSTKGPSVFPLAPCQVQLQESGPGLVKPSETLSLTCTVSGGSISGYYWSWIRQPPGKGLEWIGYIYYSGSTNYNPSLKSRVTISVDTSKNQFSLKLNSVTAADTAVYYCARAPLHGDYKWFHPWGQGTLVTVSSASTKGPSVFPLAPCSRSTSESTAALGCLVKDYFPEPVTVSWNSGALTSGVHTFPAVLQSSGLYSLSSVVTVPSSSLGTKTYTCNVDHKPSNTKVDKRVESKYGPPCPPCPAPEFEGGPSVFLFPPKPKDTLMISRTPEVTCVVVDVSQEDPEVQFNWYVDGVEVHNAKTKPREEQFNSTYRVVSVLTVLHQDWLNGKEYKCKVSNKGLPSSIEKTISKAKGQPREPQVYTLPPSQEEMTKNQVSLTCLVKGFYPSDIAVEWESNGQPENNYKTTPPVLDSDGSFFLYSRLTVDKSRWQEGNVFSCSVMHEALHNHYTQKSLSLSLGK

SEQ ID NO: 221 - DNA, 1821 bp, Artificial
  Synthetic construct of 281VL4-CH1(118-131/S119T)-281
atgaagcacctgtggttcttcctcctgctggtggcggctcccagatgggtcctgtccgaggtccagctggtgcagtctgggtctgagctgaagaagcctgggtcctcggtgaaggtctcctgcaaggcttctggaggcacctccaggagctttgctatcagctgggtgcgacaggcccctggacaaggacttgagtggatgggagggatcatccctatctttggtccagcaaactacgcacagaagttccagggcagagtcacgattaccgcggacgaatccacgagcacagcctacatggagctgagtagcctgagatctgaggacacggccgtgtattactgtgcgaggcacgctattgctatgggttggggagttattacaacgaactactttgactcctggggccaagggacaatggtcaccgtctcctcagctaccaccaaggggccatccgtcttccccctggcgccctgccaggtgcagctgcaggagtcgggcccaggactggtgaagccttcggagaccctgtccctcacctgcactgtctctggtggctccatcagtggttactactggagctggatccggcagcccccagggaagggactggagtggattgggtatatctattacagtgggagcaccaactacaatccctccctcaagagtcgagtcaccatatcagtagacacgtccaagaaccagttctccctgaagctgaattctgtgaccgctgcggacacggccgtgtattactgtgcgagagcccccttgcacggtgactacaaatggttccacccctggggccagggaaccctggtcaccgtctcctcagctagcaccaaggggccatccgtcttccccctggcgccctgctccaggagcacctccgagagcacagccgccctgggctgcctggtcaaggactacttccccgaaccggtgacggtgtcgtggaactcaggcgccctgaccagcggcgtgcacaccttcccggctgtcctacagtcctcaggactctactccctcagcagcgtggtgaccgtgccctccagcagcttgggcacgaagacctacacctgcaacgtagatcacaagcccagcaacaccaaggtggacaagagagttgagtccaaatatggtcccccatgcccaccatgcccagcacctgagttcgaggggggaccatcagtcttcctgttccccccaaaacccaaggacactctcatgatctcccggacccctgaggtcacgtgcgtggtggtggacgtgagccaggaagaccccgaggtccagttcaactggtacgtggatggcgtggaggtgcataatgccaagacaaagccgcgggaggagcagttcaacagcacgtaccgtgtggtcagcgtcctcaccgtcctgcaccaggactggctgaacggcaaggagtacaagtgcaaggtctccaacaaaggcctcccgtcctccatcgagaaaaccatctccaaagccaaagggcagccccgagagccacaggtgtacaccctgcccccatcccaggaggagatgaccaagaaccaggtcagcctgacctgcctggtcaaaggcttctaccccagcgacatcgccgtggagtgggagagcaatgggcagccggagaacaactacaagaccacgcctcccgtgctggactccgacggctccttcttcctctacagcaggctaaccgtggacaagagcaggtggcaggaggggaatgtcttctcatgctccgtgatgcatgaggctctgcacaaccactacacacagaagagcctctccctgtctctgggtaaatga

SEQ ID NO: 222 - protein, 606 aa, Artificial
  Synthetic construct of 281VL4-CH1(118-131/S119T)-281
MKHLWFFLLLVAAPRWVLSEVQLVQSGSELKKPGSSVKVSCKASGGTSRSFAISWVRQAPGQGLEWMGGIIPIFGPANYAQKFQGRVTITADESTSTAYMELSSLRSEDTAVYYCARHAIAMGWGVITTNYFDSWGQGTMVTVSSATTKGPSVFPLAPCQVQLQESGPGLVKPSETLSLTCTVSGGSISGYYWSWIRQPPGKGLEWIGYIYYSGSTNYNPSLKSRVTISVDTSKNQFSLKLNSVTAADTAVYYCARAPLHGDYKWFHPWGQGTLVTVSSASTKGPSVFPLAPCSRSTSESTAALGCLVKDYFPEPVTVSWNSGALTSGVHTFPAVLQSSGLYSLSSVVTVPSSSLGTKTYTCNVDHKPSNTKVDKRVESKYGPPCPPCPAPEFEGGPSVFLFPPKPKDTLMISRTPEVTCVVVDVSQEDPEVQFNWYVDGVEVHNAKTKPREEQFNSTYRVVSVLTVLHQDWLNGKEYKCKVSNKGLPSSIEKTISKAKGQPREPQVYTLPPSQEEMTKNQVSLTCLVKGFYPSDIAVEWESNGQPENNYKTTPPVLDSDGSFFLYSRLTVDKSRWQEGNVFSCSVMHEALHNHYTQKSLSLSLGK

SEQ ID NO: 223 - DNA, 1821 bp, Artificial
  Synthetic construct of 281VL4-CH1(118-131/P123F)-281
atgaagcacctgtggttcttcctcctgctggtggcggctcccagatgggtcctgtccgaggtccagctggtgcagtctgggtctgagctgaagaagcctgggtcctcggtgaaggtctcctgcaaggcttctggaggcacctccaggagctttgctatcagctgggtgcgacaggcccctggacaaggacttgagtggatgggagggatcatccctatctttggtccagcaaactacgcacagaagttccagggcagagtcacgattaccgcggacgaatccacgagcacagcctacatggagctgagtagcctgagatctgaggacacggccgtgtattactgtgcgaggcacgctattgctatgggttggggagttattacaacgaactactttgactcctggggccaagggacaatggtcaccgtctcctcagctagcaccaaggggttctccgtcttccccctggcgccctgccaggtgcagctgcaggagtcgggcccaggactggtgaagccttcggagaccctgtccctcacctgcactgtctctggtggctccatcagtggttactactggagctggatccggcagcccccagggaagggactggagtggattgggtatatctattacagtgggagcaccaactacaatccctccctcaagagtcgagtcaccatatcagtagacacgtccaagaaccagttctccctgaagctgaattctgtgaccgctgcggacacggccgtgtattactgtgcgagagcccccttgcacggtgactacaaatggttccacccctggggccagggaaccctggtcaccgtctcctcagctagcaccaaggggccatccgtcttccccctggcgccctgctccaggagcacctccgagagcacagccgccctgggctgcctggtcaaggactacttccccgaaccggtgacggtgtcgtggaactcaggcgccctgaccagcggcgtgcacaccttcccggctgtcctacagtcctcaggactctactccctcagcagcgtggtgaccgtgccctccagcagcttgggcacgaagacctacacctgcaacgtagatcacaagcccagcaacaccaaggtggacaagagagttgagtccaaatatggtcccccatgcccaccatgcccagcacctgagttcgaggggggaccatcagtcttcctgttccccccaaaacccaaggacactctcatgatctcccggacccctgaggtcacgtgcgtggtggtggacgtgagccaggaagaccccgaggtccagttcaactggtacgtggatggcgtggaggtgcataatgccaagacaaagccgcgggaggagcagttcaacagcacgtaccgtgtggtcagcgtcctcaccgtcctgcaccaggactggctgaacggcaaggagtacaagtgcaaggtctccaacaaaggcctcccgtcctccatcgagaaaaccatctccaaagccaaagggcagccccgagagccacaggtgtacaccctgcccccatcccaggaggagatgaccaagaaccaggtcagcctgacctgcctggtcaaaggcttctaccccagcgacatcgccgtggagtgggagagcaatgggcagccggagaacaactacaagaccacgcctcccgtgctggactccgacggctccttcttcctctacagcaggctaaccgtggacaagagcaggtggcaggaggggaatgtcttctcatgctccgtgatgcatgaggctctgcacaaccactacacacagaagagcctctccctgtctctgggtaaatga

SEQ ID NO: 224 - protein, 606 aa, Artificial
  Synthetic construct of 281VL4-CH1(118-131/P123F)-281
MKHLWFFLLLVAAPRWVLSEVQLVQSGSELKKPGSSVKVSCKASGGTSRSFAISWVRQAPGQGLEWMGGIIPIFGPANYAQKFQGRVTITADESTSTAYMELSSLRSEDTAVYYCARHAIAMGWGVITTNYFDSWGQGTMVTVSSASTKGFSVFPLAPCQVQLQESGPGLVKPSETLSLTCTVSGGSISGYYWSWIRQPPGKGLEWIGYIYYSGSTNYNPSLKSRVTISVDTSKNQFSLKLNSVTAADTAVYYCARAPLHGDYKWFHPWGQGTLVTVSSASTKGPSVFPLAPCSRSTSESTAALGCLVKDYFPEPVTVSWNSGALTSGVHTFPAVLQSSGLYSLSSVVTVPSSSLGTKTYTCNVDHKPSNTKVDKRVESKYGPPCPPCPAPEFEGGPSVFLFPPKPKDTLMISRTPEVTCVVVDVSQEDPEVQFNWYVDGVEVHNAKTKPREEQFNSTYRVVSVLTVLHQDWLNGKEYKCKVSNKGLPSSIEKTISKAKGQPREPQVYTLPPSQEEMTKNQVSLTCLVKGFYPSDIAVEWESNGQPENNYKTTPPVLDSDGSFFLYSRLTVDKSRWQEGNVFSCSVMHEALHNHYTQKSLSLSLGK

SEQ ID NO: 225 - DNA, 1821 bp, Artificial
  Synthetic construct of 281VL4-CH1(118-131/V125L)-281
atgaagcacctgtggttcttcctcctgctggtggcggctcccagatgggtcctgtccgaggtccagctggtgcagtctgggtctgagctgaagaagcctgggtcctcggtgaaggtctcctgcaaggcttctggaggcacctccaggagctttgctatcagctgggtgcgacaggcccctggacaaggacttgagtggatgggagggatcatccctatctttggtccagcaaactacgcacagaagttccagggcagagtcacgattaccgcggacgaatccacgagcacagcctacatggagctgagtagcctgagatctgaggacacggccgtgtattactgtgcgaggcacgctattgctatgggttggggagttattacaacgaactactttgactcctggggccaagggacaatggtcaccgtctcctcagctagcaccaaggggccatccctgttccccctggcgccctgccaggtgcagctgcaggagtcgggcccaggactggtgaagccttcggagaccctgtccctcacctgcactgtctctggtggctccatcagtggttactactggagctggatccggcagcccccagggaagggactggagtggattgggtatatctattacagtgggagcaccaactacaatccctccctcaagagtcgagtcaccatatcagtagacacgtccaagaaccagttctccctgaagctgaattctgtgaccgctgcggacacggccgtgtattactgtgcgagagcccccttgcacggtgactacaaatggttccacccctggggccagggaaccctggtcaccgtctcctcagctagcaccaaggggccatccgtcttccccctggcgccctgctccaggagcacctccgagagcacagccgccctgggctgcctggtcaaggactacttccccgaaccggtgacggtgtcgtggaactcaggcgccctgaccagcggcgtgcacaccttcccggctgtcctacagtcctcaggactctactccctcagcagcgtggtgaccgtgccctccagcagcttgggcacgaagacctacacctgcaacgtagatcacaagcccagcaacaccaaggtggacaagagagttgagtccaaatatggtcccccatgcccaccatgcccagcacctgagttcgaggggggaccatcagtcttcctgttccccccaaaacccaaggacactctcatgatctcccggacccctgaggtcacgtgcgtggtggtggacgtgagccaggaagaccccgaggtccagttcaactggtacgtggatggcgtggaggtgcataatgccaagacaaagccgcgggaggagcagttcaacagcacgtaccgtgtggtcagcgtcctcaccgtcctgcaccaggactggctgaacggcaaggagtacaagtgcaaggtctccaacaaaggcctcccgtcctccatcgagaaaaccatctccaaagccaaagggcagccccgagagccacaggtgtacaccctgcccccatcccaggaggagatgaccaagaaccaggtcagcctgacctgcctggtcaaaggcttctaccccagcgacatcgccgtggagtgggagagcaatgggcagccggagaacaactacaagaccacgcctcccgtgctggactccgacggctccttcttcctctacagcaggctaaccgtggacaagagcaggtggcaggaggggaatgtcttctcatgctccgtgatgcatgaggctctgcacaaccactacacacagaagagcctctccctgtctctgggtaaatga

SEQ ID NO: 226 - protein, 606 aa, Artificial
  Synthetic construct of 281VL4-CH1(118-131/V125L)-281
MKHLWFFLLLVAAPRWVLSEVQLVQSGSELKKPGSSVKVSCKASGGTSRSFAISWVRQAPGQGLEWMGGIIPIFGPANYAQKFQGRVTITADESTSTAYMELSSLRSEDTAVYYCARHAIAMGWGVITTNYFDSWGQGTMVTVSSASTKGPSLFPLAPCQVQLQESGPGLVKPSETLSLTCTVSGGSISGYYWSWIRQPPGKGLEWIGYIYYSGSTNYNPSLKSRVTISVDTSKNQFSLKLNSVTAADTAVYYCARAPLHGDYKWFHPWGQGTLVTVSSASTKGPSVFPLAPCSRSTSESTAALGCLVKDYFPEPVTVSWNSGALTSGVHTFPAVLQSSGLYSLSSVVTVPSSSLGTKTYTCNVDHKPSNTKVDKRVESKYGPPCPPCPAPEFEGGPSVFLFPPKPKDTLMISRTPEVTCVVVDVSQEDPEVQFNWYVDGVEVHNAKTKPREEQFNSTYRVVSVLTVLHQDWLNGKEYKCKVSNKGLPSSIEKTISKAKGQPREPQVYTLPPSQEEMTKNQVSLTCLVKGFYPSDIAVEWESNGQPENNYKTTPPVLDSDGSFFLYSRLTVDKSRWQEGNVFSCSVMHEALHNHYTQKSLSLSLGK

SEQ ID NO: 227 - DNA, 1821 bp, Artificial
  Synthetic construct of 281VL4-CH1(118-131/V125I)-281
atgaagcacctgtggttcttcctcctgctggtggcggctcccagatgggtcctgtccgaggtccagctggtgcagtctgggtctgagctgaagaagcctgggtcctcggtgaaggtctcctgcaaggcttctggaggcacctccaggagctttgctatcagctgggtgcgacaggcccctggacaaggacttgagtggatgggagggatcatccctatctttggtccagcaaactacgcacagaagttccagggcagagtcacgattaccgcggacgaatccacgagcacagcctacatggagctgagtagcctgagatctgaggacacggccgtgtattactgtgcgaggcacgctattgctatgggttggggagttattacaacgaactactttgactcctggggccaagggacaatggtcaccgtctcctcagctagcaccaaggggccatccatcttccccctggcgccctgccaggtgcagctgcaggagtcgggcccaggactggtgaagccttcggagaccctgtccctcacctgcactgtctctggtggctccatcagtggttactactggagctggatccggcagcccccagggaagggactggagtggattgggtatatctattacagtgggagcaccaactacaatccctccctcaagagtcgagtcaccatatcagtagacacgtccaagaaccagttctccctgaagctgaattctgtgaccgctgcggacacggccgtgtattactgtgcgagagcccccttgcacggtgactacaaatggttccacccctggggccagggaaccctggtcaccgtctcctcagctagcaccaaggggccatccgtcttccccctggcgccctgctccaggagcacctccgagagcacagccgccctgggctgcctggtcaaggactacttccccgaaccggtgacggtgtcgtggaactcaggcgccctgaccagcggcgtgcacaccttcccggctgtcctacagtcctcaggactctactccctcagcagcgtggtgaccgtgccctccagcagcttgggcacgaagacctacacctgcaacgtagatcacaagcccagcaacaccaaggtggacaagagagttgagtccaaatatggtcccccatgcccaccatgcccagcacctgagttcgaggggggaccatcagtcttcctgttccccccaaaacccaaggacactctcatgatctcccggacccctgaggtcacgtgcgtggtggtggacgtgagccaggaagaccccgaggtccagttcaactggtacgtggatggcgtggaggtgcataatgccaagacaaagccgcgggaggagcagttcaacagcacgtaccgtgtggtcagcgtcctcaccgtcctgcaccaggactggctgaacggcaaggagtacaagtgcaaggtctccaacaaaggcctcccgtcctccatcgagaaaaccatctccaaagccaaagggcagccccgagagccacaggtgtacaccctgcccccatcccaggaggagatgaccaagaaccaggtcagcctgacctgcctggtcaaaggcttctaccccagcgacatcgccgtggagtgggagagcaatgggcagccggagaacaactacaagaccacgcctcccgtgctggactccgacggctccttcttcctctacagcaggctaaccgtggacaagagcaggtggcaggaggggaatgtcttctcatgctccgtgatgcatgaggctctgcacaaccactacacacagaagagcctctccctgtctctgggtaaatga

SEQ ID NO: 228 - protein, 606 aa, Artificial
  Synthetic construct of 281VL4-CH1(118-131/V125I)-281
MKHLWFFLLLVAAPRWVLSEVQLVQSGSELKKPGSSVKVSCKASGGTSRSFAISWVRQAPGQGLEWMGGIIPIFGPANYAQKFQGRVTITADESTSTAYMELSSLRSEDTAVYYCARHAIAMGWGVITTNYFDSWGQGTMVTVSSASTKGPSIFPLAPCQVQLQESGPGLVKPSETLSLTCTVSGGSISGYYWSWIRQPPGKGLEWIGYIYYSGSTNYNPSLKSRVTISVDTSKNQFSLKLNSVTAADTAVYYCARAPLHGDYKWFHPWGQGTLVTVSSASTKGPSVFPLAPCSRSTSESTAALGCLVKDYFPEPVTVSWNSGALTSGVHTFPAVLQSSGLYSLSSVVTVPSSSLGTKTYTCNVDHKPSNTKVDKRVESKYGPPCPPCPAPEFEGGPSVFLFPPKPKDTLMISRTPEVTCVVVDVSQEDPEVQFNWYVDGVEVHNAKTKPREEQFNSTYRVVSVLTVLHQDWLNGKEYKCKVSNKGLPSSIEKTISKAKGQPREPQVYTLPPSQEEMTKNQVSLTCLVKGFYPSDIAVEWESNGQPENNYKTTPPVLDSDGSFFLYSRLTVDKSRWQEGNVFSCSVMHEALHNHYTQKSLSLSLGK

SEQ ID NO: 229 - DNA, 1821 bp, Artificial
  Synthetic construct of 281VL4-CH1(118-131/F126L)-281
atgaagcacctgtggttcttcctcctgctggtggcggctcccagatgggtcctgtccgaggtccagctggtgcagtctgggtctgagctgaagaagcctgggtcctcggtgaaggtctcctgcaaggcttctggaggcacctccaggagctttgctatcagctgggtgcgacaggcccctggacaaggacttgagtggatgggagggatcatccctatctttggtccagcaaactacgcacagaagttccagggcagagtcacgattaccgcggacgaatccacgagcacagcctacatggagctgagtagcctgagatctgaggacacggccgtgtattactgtgcgaggcacgctattgctatgggttggggagttattacaacgaactactttgactcctggggccaagggacaatggtcaccgtctcctcagctagcaccaaggggccatccgtcctgcccctggcgccctgccaggtgcagctgcaggagtcgggcccaggactggtgaagccttcggagaccctgtccctcacctgcactgtctctggtggctccatcagtggttactactggagctggatccggcagcccccagggaagggactggagtggattgggtatatctattacagtgggagcaccaactacaatccctccctcaagagtcgagtcaccatatcagtagacacgtccaagaaccagttctccctgaagctgaattctgtgaccgctgcggacacggccgtgtattactgtgcgagagcccccttgcacggtgactacaaatggttccacccctggggccagggaaccctggtcaccgtctcctcagctagcaccaaggggccatccgtcttccccctggcgccctgctccaggagcacctccgagagcacagccgccctgggctgcctggtcaaggactacttccccgaaccggtgacggtgtcgtggaactcaggcgccctgaccagcggcgtgcacaccttcccggctgtcctacagtcctcaggactctactccctcagcagcgtggtgaccgtgccctccagcagcttgggcacgaagacctacacctgcaacgtagatcacaagcccagcaacaccaaggtggacaagagagttgagtccaaatatggtcccccatgcccaccatgcccagcacctgagttcgaggggggaccatcagtcttcctgttccccccaaaacccaaggacactctcatgatctcccggacccctgaggtcacgtgcgtggtggtggacgtgagccaggaagaccccgaggtccagttcaactggtacgtggatggcgtggaggtgcataatgccaagacaaagccgcgggaggagcagttcaacagcacgtaccgtgtggtcagcgtcctcaccgtcctgcaccaggactggctgaacggcaaggagtacaagtgcaaggtctccaacaaaggcctcccgtcctccatcgagaaaaccatctccaaagccaaagggcagccccgagagccacaggtgtacaccctgcccccatcccaggaggagatgaccaagaaccaggtcagcctgacctgcctggtcaaaggcttctaccccagcgacatcgccgtggagtgggagagcaatgggcagccggagaacaactacaagaccacgcctcccgtgctggactccgacggctccttcttcctctacagcaggctaaccgtggacaagagcaggtggcaggaggggaatgtcttctcatgctccgtgatgcatgaggctctgcacaaccactacacacagaagagcctctccctgtctctgggtaaatga

SEQ ID NO: 230 - protein, 606 aa, Artificial
  Synthetic construct of 281VL4-CH1(118-131/F126L)-281
MKHLWFFLLLVAAPRWVLSEVQLVQSGSELKKPGSSVKVSCKASGGTSRSFAISWVRQAPGQGLEWMGGIIPIFGPANYAQKFQGRVTITADESTSTAYMELSSLRSEDTAVYYCARHAIAMGWGVITTNYFDSWGQGTMVTVSSASTKGPSVLPLAPCQVQLQESGPGLVKPSETLSLTCTVSGGSISGYYWSWIRQPPGKGLEWIGYIYYSGSTNYNPSLKSRVTISVDTSKNQFSLKLNSVTAADTAVYYCARAPLHGDYKWFHPWGQGTLVTVSSASTKGPSVFPLAPCSRSTSESTAALGCLVKDYFPEPVTVSWNSGALTSGVHTFPAVLQSSGLYSLSSVVTVPSSSLGTKTYTCNVDHKPSNTKVDKRVESKYGPPCPPCPAPEFEGGPSVFLFPPKPKDTLMISRTPEVTCVVVDVSQEDPEVQFNWYVDGVEVHNAKTKPREEQFNSTYRVVSVLTVLHQDWLNGKEYKCKVSNKGLPSSIEKTISKAKGQPREPQVYTLPPSQEEMTKNQVSLTCLVKGFYPSDIAVEWESNGQPENNYKTTPPVLDSDGSFFLYSRLTVDKSRWQEGNVFSCSVMHEALHNHYTQKSLSLSLGK

SEQ ID NO: 231 - DNA, 1821 bp, Artificial
  Synthetic construct of 281VL4-CH1(118-131/F126Y)-281
atgaagcacctgtggttcttcctcctgctggtggcggctcccagatgggtcctgtccgaggtccagctggtgcagtctgggtctgagctgaagaagcctgggtcctcggtgaaggtctcctgcaaggcttctggaggcacctccaggagctttgctatcagctgggtgcgacaggcccctggacaaggacttgagtggatgggagggatcatccctatctttggtccagcaaactacgcacagaagttccagggcagagtcacgattaccgcggacgaatccacgagcacagcctacatggagctgagtagcctgagatctgaggacacggccgtgtattactgtgcgaggcacgctattgctatgggttggggagttattacaacgaactactttgactcctggggccaagggacaatggtcaccgtctcctcagctagcaccaaggggccatccgtctaccccctggcgccctgccaggtgcagctgcaggagtcgggcccaggactggtgaagccttcggagaccctgtccctcacctgcactgtctctggtggctccatcagtggttactactggagctggatccggcagcccccagggaagggactggagtggattgggtatatctattacagtgggagcaccaactacaatccctccctcaagagtcgagtcaccatatcagtagacacgtccaagaaccagttctccctgaagctgaattctgtgaccgctgcggacacggccgtgtattactgtgcgagagcccccttgcacggtgactacaaatggttccacccctggggccagggaaccctggtcaccgtctcctcagctagcaccaaggggccatccgtcttccccctggcgccctgctccaggagcacctccgagagcacagccgccctgggctgcctggtcaaggactacttccccgaaccggtgacggtgtcgtggaactcaggcgccctgaccagcggcgtgcacaccttcccggctgtcctacagtcctcaggactctactccctcagcagcgtggtgaccgtgccctccagcagcttgggcacgaagacctacacctgcaacgtagatcacaagcccagcaacaccaaggtggacaagagagttgagtccaaatatggtcccccatgcccaccatgcccagcacctgagttcgaggggggaccatcagtcttcctgttccccccaaaacccaaggacactctcatgatctcccggacccctgaggtcacgtgcgtggtggtggacgtgagccaggaagaccccgaggtccagttcaactggtacgtggatggcgtggaggtgcataatgccaagacaaagccgcgggaggagcagttcaacagcacgtaccgtgtggtcagcgtcctcaccgtcctgcaccaggactggctgaacggcaaggagtacaagtgcaaggtctccaacaaaggcctcccgtcctccatcgagaaaaccatctccaaagccaaagggcagccccgagagccacaggtgtacaccctgcccccatcccaggaggagatgaccaagaaccaggtcagcctgacctgcctggtcaaaggcttctaccccagcgacatcgccgtggagtgggagagcaatgggcagccggagaacaactacaagaccacgcctcccgtgctggactccgacggctccttcttcctctacagcaggctaaccgtggacaagagcaggtggcaggaggggaatgtcttctcatgctccgtgatgcatgaggctctgcacaaccactacacacagaagagcctctccctgtctctgggtaaatga

SEQ ID NO: 232 - protein, 606 aa, Artificial
  Synthetic construct of 281VL4-CH1(118-131/F126Y)-281
MKHLWFFLLLVAAPRWVLSEVQLVQSGSELKKPGSSVKVSCKASGGTSRSFAISWVRQAPGQGLEWMGGIIPIFGPANYAQKFQGRVTITADESTSTAYMELSSLRSEDTAVYYCARHAIAMGWGVITTNYFDSWGQGTMVTVSSASTKGPSVYPLAPCQVQLQESGPGLVKPSETLSLTCTVSGGSISGYYWSWIRQPPGKGLEWIGYIYYSGSTNYNPSLKSRVTISVDTSKNQFSLKLNSVTAADTAVYYCARAPLHGDYKWFHPWGQGTLVTVSSASTKGPSVFPLAPCSRSTSESTAALGCLVKDYFPEPVTVSWNSGALTSGVHTFPAVLQSSGLYSLSSVVTVPSSSLGTKTYTCNVDHKPSNTKVDKRVESKYGPPCPPCPAPEFEGGPSVFLFPPKPKDTLMISRTPEVTCVVVDVSQEDPEVQFNWYVDGVEVHNAKTKPREEQFNSTYRVVSVLTVLHQDWLNGKEYKCKVSNKGLPSSIEKTISKAKGQPREPQVYTLPPSQEEMTKNQVSLTCLVKGFYPSDIAVEWESNGQPENNYKTTPPVLDSDGSFFLYSRLTVDKSRWQEGNVFSCSVMHEALHNHYTQKSLSLSLGK

SEQ ID NO: 233 - DNA, 1821 bp, Artificial
  Synthetic construct of 281VL4-CH1(118-131/P127G)-281
atgaagcacctgtggttcttcctcctgctggtggcggctcccagatgggtcctgtccgaggtccagctggtgcagtctgggtctgagctgaagaagcctgggtcctcggtgaaggtctcctgcaaggcttctggaggcacctccaggagctttgctatcagctgggtgcgacaggcccctggacaaggacttgagtggatgggagggatcatccctatctttggtccagcaaactacgcacagaagttccagggcagagtcacgattaccgcggacgaatccacgagcacagcctacatggagctgagtagcctgagatctgaggacacggccgtgtattactgtgcgaggcacgctattgctatgggttggggagttattacaacgaactactttgactcctggggccaagggacaatggtcaccgtctcctcagctagcaccaaggggccatccgtcttcggcctggcgccctgccaggtgcagctgcaggagtcgggcccaggactggtgaagccttcggagaccctgtccctcacctgcactgtctctggtggctccatcagtggttactactggagctggatccggcagcccccagggaagggactggagtggattgggtatatctattacagtgggagcaccaactacaatccctccctcaagagtcgagtcaccatatcagtagacacgtccaagaaccagttctccctgaagctgaattctgtgaccgctgcggacacggccgtgtattactgtgcgagagcccccttgcacggtgactacaaatggttccacccctggggccagggaaccctggtcaccgtctcctcagctagcaccaaggggccatccgtcttccccctggcgccctgctccaggagcacctccgagagcacagccgccctgggctgcctggtcaaggactacttccccgaaccggtgacggtgtcgtggaactcaggcgccctgaccagcggcgtgcacaccttcccggctgtcctacagtcctcaggactctactccctcagcagcgtggtgaccgtgccctccagcagcttgggcacgaagacctacacctgcaacgtagatcacaagcccagcaacaccaaggtggacaagagagttgagtccaaatatggtcccccatgcccaccatgcccagcacctgagttcgaggggggaccatcagtcttcctgttccccccaaaacccaaggacactctcatgatctcccggacccctgaggtcacgtgcgtggtggtggacgtgagccaggaagaccccgaggtccagttcaactggtacgtggatggcgtggaggtgcataatgccaagacaaagccgcgggaggagcagttcaacagcacgtaccgtgtggtcagcgtcctcaccgtcctgcaccaggactggctgaacggcaaggagtacaagtgcaaggtctccaacaaaggcctcccgtcctccatcgagaaaaccatctccaaagccaaagggcagccccgagagccacaggtgtacaccctgcccccatcccaggaggagatgaccaagaaccaggtcagcctgacctgcctggtcaaaggcttctaccccagcgacatcgccgtggagtgggagagcaatgggcagccggagaacaactacaagaccacgcctcccgtgctggactccgacggctccttcttcctctacagcaggctaaccgtggacaagagcaggtggcaggaggggaatgtcttctcatgctccgtgatgcatgaggctctgcacaaccactacacacagaagagcctctccctgtctctgggtaaatga

SEQ ID NO: 234 - protein, 606 aa, Artificial
  Synthetic construct of 281VL4-CH1(118-131/P127G)-281
MKHLWFFLLLVAAPRWVLSEVQLVQSGSELKKPGSSVKVSCKASGGTSRSFAISWVRQAPGQGLEWMGGIIPIFGPANYAQKFQGRVTITADESTSTAYMELSSLRSEDTAVYYCARHAIAMGWGVITTNYFDSWGQGTMVTVSSASTKGPSVFGLAPCQVQLQESGPGLVKPSETLSLTCTVSGGSISGYYWSWIRQPPGKGLEWIGYIYYSGSTNYNPSLKSRVTISVDTSKNQFSLKLNSVTAADTAVYYCARAPLHGDYKWFHPWGQGTLVTVSSASTKGPSVFPLAPCSRSTSESTAALGCLVKDYFPEPVTVSWNSGALTSGVHTFPAVLQSSGLYSLSSVVTVPSSSLGTKTYTCNVDHKPSNTKVDKRVESKYGPPCPPCPAPEFEGGPSVFLFPPKPKDTLMISRTPEVTCVVVDVSQEDPEVQFNWYVDGVEVHNAKTKPREEQFNSTYRVVSVLTVLHQDWLNGKEYKCKVSNKGLPSSIEKTISKAKGQPREPQVYTLPPSQEEMTKNQVSLTCLVKGFYPSDIAVEWESNGQPENNYKTTPPVLDSDGSFFLYSRLTVDKSRWQEGNVFSCSVMHEALHNHYTQKSLSLSLGK

SEQ ID NO: 235 - DNA, 1821 bp, Artificial
  Synthetic construct of 281VL4-CH1(118-131/L128V)-281
atgaagcacctgtggttcttcctcctgctggtggcggctcccagatgggtcctgtccgaggtccagctggtgcagtctgggtctgagctgaagaagcctgggtcctcggtgaaggtctcctgcaaggcttctggaggcacctccaggagctttgctatcagctgggtgcgacaggcccctggacaaggacttgagtggatgggagggatcatccctatctttggtccagcaaactacgcacagaagttccagggcagagtcacgattaccgcggacgaatccacgagcacagcctacatggagctgagtagcctgagatctgaggacacggccgtgtattactgtgcgaggcacgctattgctatgggttggggagttattacaacgaactactttgactcctggggccaagggacaatggtcaccgtctcctcagctagcaccaaggggccatccgtcttccccgtggcgccctgccaggtgcagctgcaggagtcgggcccaggactggtgaagccttcggagaccctgtccctcacctgcactgtctctggtggctccatcagtggttactactggagctggatccggcagcccccagggaagggactggagtggattgggtatatctattacagtgggagcaccaactacaatccctccctcaagagtcgagtcaccatatcagtagacacgtccaagaaccagttctccctgaagctgaattctgtgaccgctgcggacacggccgtgtattactgtgcgagagcccccttgcacggtgactacaaatggttccacccctggggccagggaaccctggtcaccgtctcctcagctagcaccaaggggccatccgtcttccccctggcgccctgctccaggagcacctccgagagcacagccgccctgggctgcctggtcaaggactacttccccgaaccggtgacggtgtcgtggaactcaggcgccctgaccagcggcgtgcacaccttcccggctgtcctacagtcctcaggactctactccctcagcagcgtggtgaccgtgccctccagcagcttgggcacgaagacctacacctgcaacgtagatcacaagcccagcaacaccaaggtggacaagagagttgagtccaaatatggtcccccatgcccaccatgcccagcacctgagttcgaggggggaccatcagtcttcctgttccccccaaaacccaaggacactctcatgatctcccggacccctgaggtcacgtgcgtggtggtggacgtgagccaggaagaccccgaggtccagttcaactggtacgtggatggcgtggaggtgcataatgccaagacaaagccgcgggaggagcagttcaacagcacgtaccgtgtggtcagcgtcctcaccgtcctgcaccaggactggctgaacggcaaggagtacaagtgcaaggtctccaacaaaggcctcccgtcctccatcgagaaaaccatctccaaagccaaagggcagccccgagagccacaggtgtacaccctgcccccatcccaggaggagatgaccaagaaccaggtcagcctgacctgcctggtcaaaggcttctaccccagcgacatcgccgtggagtgggagagcaatgggcagccggagaacaactacaagaccacgcctcccgtgctggactccgacggctccttcttcctctacagcaggctaaccgtggacaagagcaggtggcaggaggggaatgtcttctcatgctccgtgatgcatgaggctctgcacaaccactacacacagaagagcctctccctgtctctgggtaaatga

SEQ ID NO: 236 - protein, 606 aa, Artificial
  Synthetic construct of 281VL4-CH1(118-131/L128V)-281
MKHLWFFLLLVAAPRWVLSEVQLVQSGSELKKPGSSVKVSCKASGGTSRSFAISWVRQAPGQGLEWMGGIIPIFGPANYAQKFQGRVTITADESTSTAYMELSSLRSEDTAVYYCARHAIAMGWGVITTNYFDSWGQGTMVTVSSASTKGPSVFPVAPCQVQLQESGPGLVKPSETLSLTCTVSGGSISGYYWSWIRQPPGKGLEWIGYIYYSGSTNYNPSLKSRVTISVDTSKNQFSLKLNSVTAADTAVYYCARAPLHGDYKWFHPWGQGTLVTVSSASTKGPSVFPLAPCSRSTSESTAALGCLVKDYFPEPVTVSWNSGALTSGVHTFPAVLQSSGLYSLSSVVTVPSSSLGTKTYTCNVDHKPSNTKVDKRVESKYGPPCPPCPAPEFEGGPSVFLFPPKPKDTLMISRTPEVTCVVVDVSQEDPEVQFNWYVDGVEVHNAKTKPREEQFNSTYRVVSVLTVLHQDWLNGKEYKCKVSNKGLPSSIEKTISKAKGQPREPQVYTLPPSQEEMTKNQVSLTCLVKGFYPSDIAVEWESNGQPENNYKTTPPVLDSDGSFFLYSRLTVDKSRWQEGNVFSCSVMHEALHNHYTQKSLSLSLGK

SEQ ID NO: 237 - DNA, 1821 bp, Artificial
  Synthetic construct of 281VL4-CH1(118-131/L128I)-281
atgaagcacctgtggttcttcctcctgctggtggcggctcccagatgggtcctgtccgaggtccagctggtgcagtctgggtctgagctgaagaagcctgggtcctcggtgaaggtctcctgcaaggcttctggaggcacctccaggagctttgctatcagctgggtgcgacaggcccctggacaaggacttgagtggatgggagggatcatccctatctttggtccagcaaactacgcacagaagttccagggcagagtcacgattaccgcggacgaatccacgagcacagcctacatggagctgagtagcctgagatctgaggacacggccgtgtattactgtgcgaggcacgctattgctatgggttggggagttattacaacgaactactttgactcctggggccaagggacaatggtcaccgtctcctcagctagcaccaaggggccatccgtcttccccatcgcgccctgccaggtgcagctgcaggagtcgggcccaggactggtgaagccttcggagaccctgtccctcacctgcactgtctctggtggctccatcagtggttactactggagctggatccggcagcccccagggaagggactggagtggattgggtatatctattacagtgggagcaccaactacaatccctccctcaagagtcgagtcaccatatcagtagacacgtccaagaaccagttctccctgaagctgaattctgtgaccgctgcggacacggccgtgtattactgtgcgagagcccccttgcacggtgactacaaatggttccacccctggggccagggaaccctggtcaccgtctcctcagctagcaccaaggggccatccgtcttccccctggcgccctgctccaggagcacctccgagagcacagccgccctgggctgcctggtcaaggactacttccccgaaccggtgacggtgtcgtggaactcaggcgccctgaccagcggcgtgcacaccttcccggctgtcctacagtcctcaggactctactccctcagcagcgtggtgaccgtgccctccagcagcttgggcacgaagacctacacctgcaacgtagatcacaagcccagcaacaccaaggtggacaagagagttgagtccaaatatggtcccccatgcccaccatgcccagcacctgagttcgaggggggaccatcagtcttcctgttccccccaaaacccaaggacactctcatgatctcccggacccctgaggtcacgtgcgtggtggtggacgtgagccaggaagaccccgaggtccagttcaactggtacgtggatggcgtggaggtgcataatgccaagacaaagccgcgggaggagcagttcaacagcacgtaccgtgtggtcagcgtcctcaccgtcctgcaccaggactggctgaacggcaaggagtacaagtgcaaggtctccaacaaaggcctcccgtcctccatcgagaaaaccatctccaaagccaaagggcagccccgagagccacaggtgtacaccctgcccccatcccaggaggagatgaccaagaaccaggtcagcctgacctgcctggtcaaaggcttctaccccagcgacatcgccgtggagtgggagagcaatgggcagccggagaacaactacaagaccacgcctcccgtgctggactccgacggctccttcttcctctacagcaggctaaccgtggacaagagcaggtggcaggaggggaatgtcttctcatgctccgtgatgcatgaggctctgcacaaccactacacacagaagagcctctccctgtctctgggtaaatga

SEQ ID NO: 238 - protein, 606 aa, Artificial
  Synthetic construct of 281VL4-CH1(118-131/L128I)-281
MKHLWFFLLLVAAPRWVLSEVQLVQSGSELKKPGSSVKVSCKASGGTSRSFAISWVRQAPGQGLEWMGGIIPIFGPANYAQKFQGRVTITADESTSTAYMELSSLRSEDTAVYYCARHAIAMGWGVITTNYFDSWGQGTMVTVSSASTKGPSVFPIAPCQVQLQESGPGLVKPSETLSLTCTVSGGSISGYYWSWIRQPPGKGLEWIGYIYYSGSTNYNPSLKSRVTISVDTSKNQFSLKLNSVTAADTAVYYCARAPLHGDYKWFHPWGQGTLVTVSSASTKGPSVFPLAPCSRSTSESTAALGCLVKDYFPEPVTVSWNSGALTSGVHTFPAVLQSSGLYSLSSVVTVPSSSLGTKTYTCNVDHKPSNTKVDKRVESKYGPPCPPCPAPEFEGGPSVFLFPPKPKDTLMISRTPEVTCVVVDVSQEDPEVQFNWYVDGVEVHNAKTKPREEQFNSTYRVVSVLTVLHQDWLNGKEYKCKVSNKGLPSSIEKTISKAKGQPREPQVYTLPPSQEEMTKNQVSLTCLVKGFYPSDIAVEWESNGQPENNYKTTPPVLDSDGSFFLYSRLTVDKSRWQEGNVFSCSVMHEALHNHYTQKSLSLSLGK

SEQ ID NO: 239 - DNA, 1821 bp, Artificial
  Synthetic construct of 281VL4-CH1(118-131/A129I)-281
atgaagcacctgtggttcttcctcctgctggtggcggctcccagatgggtcctgtccgaggtccagctggtgcagtctgggtctgagctgaagaagcctgggtcctcggtgaaggtctcctgcaaggcttctggaggcacctccaggagctttgctatcagctgggtgcgacaggcccctggacaaggacttgagtggatgggagggatcatccctatctttggtccagcaaactacgcacagaagttccagggcagagtcacgattaccgcggacgaatccacgagcacagcctacatggagctgagtagcctgagatctgaggacacggccgtgtattactgtgcgaggcacgctattgctatgggttggggagttattacaacgaactactttgactcctggggccaagggacaatggtcaccgtctcctcagctagcaccaaggggccatccgtcttccccctgatcccctgccaggtgcagctgcaggagtcgggcccaggactggtgaagccttcggagaccctgtccctcacctgcactgtctctggtggctccatcagtggttactactggagctggatccggcagcccccagggaagggactggagtggattgggtatatctattacagtgggagcaccaactacaatccctccctcaagagtcgagtcaccatatcagtagacacgtccaagaaccagttctccctgaagctgaattctgtgaccgctgcggacacggccgtgtattactgtgcgagagcccccttgcacggtgactacaaatggttccacccctggggccagggaaccctggtcaccgtctcctcagctagcaccaaggggccatccgtcttccccctggcgccctgctccaggagcacctccgagagcacagccgccctgggctgcctggtcaaggactacttccccgaaccggtgacggtgtcgtggaactcaggcgccctgaccagcggcgtgcacaccttcccggctgtcctacagtcctcaggactctactccctcagcagcgtggtgaccgtgccctccagcagcttgggcacgaagacctacacctgcaacgtagatcacaagcccagcaacaccaaggtggacaagagagttgagtccaaatatggtcccccatgcccaccatgcccagcacctgagttcgaggggggaccatcagtcttcctgttccccccaaaacccaaggacactctcatgatctcccggacccctgaggtcacgtgcgtggtggtggacgtgagccaggaagaccccgaggtccagttcaactggtacgtggatggcgtggaggtgcataatgccaagacaaagccgcgggaggagcagttcaacagcacgtaccgtgtggtcagcgtcctcaccgtcctgcaccaggactggctgaacggcaaggagtacaagtgcaaggtctccaacaaaggcctcccgtcctccatcgagaaaaccatctccaaagccaaagggcagccccgagagccacaggtgtacaccctgcccccatcccaggaggagatgaccaagaaccaggtcagcctgacctgcctggtcaaaggcttctaccccagcgacatcgccgtggagtgggagagcaatgggcagccggagaacaactacaagaccacgcctcccgtgctggactccgacggctccttcttcctctacagcaggctaaccgtggacaagagcaggtggcaggaggggaatgtcttctcatgctccgtgatgcatgaggctctgcacaaccactacacacagaagagcctctccctgtctctgggtaaatga

SEQ ID NO: 240 - protein, 606 aa, Artificial
  Synthetic construct of 281VL4-CH1(118-131/A129I)-281
MKHLWFFLLLVAAPRWVLSEVQLVQSGSELKKPGSSVKVSCKASGGTSRSFAISWVRQAPGQGLEWMGGIIPIFGPANYAQKFQGRVTITADESTSTAYMELSSLRSEDTAVYYCARHAIAMGWGVITTNYFDSWGQGTMVTVSSASTKGPSVFPLIPCQVQLQESGPGLVKPSETLSLTCTVSGGSISGYYWSWIRQPPGKGLEWIGYIYYSGSTNYNPSLKSRVTISVDTSKNQFSLKLNSVTAADTAVYYCARAPLHGDYKWFHPWGQGTLVTVSSASTKGPSVFPLAPCSRSTSESTAALGCLVKDYFPEPVTVSWNSGALTSGVHTFPAVLQSSGLYSLSSVVTVPSSSLGTKTYTCNVDHKPSNTKVDKRVESKYGPPCPPCPAPEFEGGPSVFLFPPKPKDTLMISRTPEVTCVVVDVSQEDPEVQFNWYVDGVEVHNAKTKPREEQFNSTYRVVSVLTVLHQDWLNGKEYKCKVSNKGLPSSIEKTISKAKGQPREPQVYTLPPSQEEMTKNQVSLTCLVKGFYPSDIAVEWESNGQPENNYKTTPPVLDSDGSFFLYSRLTVDKSRWQEGNVFSCSVMHEALHNHYTQKSLSLSLGK

SEQ ID NO: 241 - DNA, 1821 bp, Artificial
  Synthetic construct of 281VL4-CH1(118-131/P130F)-281
atgaagcacctgtggttcttcctcctgctggtggcggctcccagatgggtcctgtccgaggtccagctggtgcagtctgggtctgagctgaagaagcctgggtcctcggtgaaggtctcctgcaaggcttctggaggcacctccaggagctttgctatcagctgggtgcgacaggcccctggacaaggacttgagtggatgggagggatcatccctatctttggtccagcaaactacgcacagaagttccagggcagagtcacgattaccgcggacgaatccacgagcacagcctacatggagctgagtagcctgagatctgaggacacggccgtgtattactgtgcgaggcacgctattgctatgggttggggagttattacaacgaactactttgactcctggggccaagggacaatggtcaccgtctcctcagctagcaccaaggggccatccgtcttccccctggcgttctgccaggtgcagctgcaggagtcgggcccaggactggtgaagccttcggagaccctgtccctcacctgcactgtctctggtggctccatcagtggttactactggagctggatccggcagcccccagggaagggactggagtggattgggtatatctattacagtgggagcaccaactacaatccctccctcaagagtcgagtcaccatatcagtagacacgtccaagaaccagttctccctgaagctgaattctgtgaccgctgcggacacggccgtgtattactgtgcgagagcccccttgcacggtgactacaaatggttccacccctggggccagggaaccctggtcaccgtctcctcagctagcaccaaggggccatccgtcttccccctggcgccctgctccaggagcacctccgagagcacagccgccctgggctgcctggtcaaggactacttccccgaaccggtgacggtgtcgtggaactcaggcgccctgaccagcggcgtgcacaccttcccggctgtcctacagtcctcaggactctactccctcagcagcgtggtgaccgtgccctccagcagcttgggcacgaagacctacacctgcaacgtagatcacaagcccagcaacaccaaggtggacaagagagttgagtccaaatatggtcccccatgcccaccatgcccagcacctgagttcgaggggggaccatcagtcttcctgttccccccaaaacccaaggacactctcatgatctcccggacccctgaggtcacgtgcgtggtggtggacgtgagccaggaagaccccgaggtccagttcaactggtacgtggatggcgtggaggtgcataatgccaagacaaagccgcgggaggagcagttcaacagcacgtaccgtgtggtcagcgtcctcaccgtcctgcaccaggactggctgaacggcaaggagtacaagtgcaaggtctccaacaaaggcctcccgtcctccatcgagaaaaccatctccaaagccaaagggcagccccgagagccacaggtgtacaccctgcccccatcccaggaggagatgaccaagaaccaggtcagcctgacctgcctggtcaaaggcttctaccccagcgacatcgccgtggagtgggagagcaatgggcagccggagaacaactacaagaccacgcctcccgtgctggactccgacggctccttcttcctctacagcaggctaaccgtggacaagagcaggtggcaggaggggaatgtcttctcatgctccgtgatgcatgaggctctgcacaaccactacacacagaagagcctctccctgtctctgggtaaatga

SEQ ID NO: 242 - protein, 606 aa, Artificial
  Synthetic construct of 281VL4-CH1(118-131/P130F)-281
MKHLWFFLLLVAAPRWVLSEVQLVQSGSELKKPGSSVKVSCKASGGTSRSFAISWVRQAPGQGLEWMGGIIPIFGPANYAQKFQGRVTITADESTSTAYMELSSLRSEDTAVYYCARHAIAMGWGVITTNYFDSWGQGTMVTVSSASTKGPSVFPLAFCQVQLQESGPGLVKPSETLSLTCTVSGGSISGYYWSWIRQPPGKGLEWIGYIYYSGSTNYNPSLKSRVTISVDTSKNQFSLKLNSVTAADTAVYYCARAPLHGDYKWFHPWGQGTLVTVSSASTKGPSVFPLAPCSRSTSESTAALGCLVKDYFPEPVTVSWNSGALTSGVHTFPAVLQSSGLYSLSSVVTVPSSSLGTKTYTCNVDHKPSNTKVDKRVESKYGPPCPPCPAPEFEGGPSVFLFPPKPKDTLMISRTPEVTCVVVDVSQEDPEVQFNWYVDGVEVHNAKTKPREEQFNSTYRVVSVLTVLHQDWLNGKEYKCKVSNKGLPSSIEKTISKAKGQPREPQVYTLPPSQEEMTKNQVSLTCLVKGFYPSDIAVEWESNGQPENNYKTTPPVLDSDGSFFLYSRLTVDKSRWQEGNVFSCSVMHEALHNHYTQKSLSLSLGK

SEQ ID NO: 243 - DNA, 81 bp, Artificial
  primer
gctagcccgaccagccccaaggtcttcccgctgagcctctgcagcacccagccagatgggaacgtggtcatcgccggatcc

SEQ ID NO: 244 - protein, 27 aa, Artificial
  primer
ASPTSPKVFPLSLCSTQPDGNVVIAGS

SEQ ID NO: 245 - DNA, 81 bp, Artificial
  primer
gctagcccgaccagccccaaggtcttcccgctgagcctctgcagcaccccccaagatgggaacgtggtcgtcgcaggatcc

SEQ ID NO: 246 - protein, 27 aa, Artificial
  primer
ASPTSPKVFPLSLCSTPQDGNVVVAGS

SEQ ID NO: 247 - DNA, 87 bp, Artificial
  primer
gcacccaccaaggctccggatgtgttccccatcatatcagggtgcagacacccaaaggataacagccctgtggtcctggcaggatcc

SEQ ID NO: 248 - protein, 29 aa, Artificial
  primer
APTKAPDVFPIISGCRHPKDNSPVVLAGS

SEQ ID NO: 249 - DNA, 90 bp, Artificial
  primer
gctagcacacagagcccatccgtcttccccttgacccgctgctgcaaaaacattccctccaatgccacctccgtgactctgggcggatcc

SEQ ID NO: 250 - protein, 30 aa, Artificial
  primer
ASTQSPSVFPLTRCCKNIPSNATSVTLGGS

SEQ ID NO: 251 - DNA, 84 bp, Artificial
  primer
gctagcaccaagggcccatcggtcttccccctggcaccctgctccaagagcacctctgggggcacagcggccctgggcggatcc

SEQ ID NO: 252 - protein, 28 aa, Artificial
  primer
ASTKGPSVFPLAPCSKSTSGGTAALGGS

SEQ ID NO: 253 - DNA, 84 bp, Artificial
  primer
gctagcaccaagggcccatcggtcttccccctggcgccctgctccaggagcacctccgagagcacagccgccctgggcggatcc

SEQ ID NO: 254 - protein, 28 aa, Artificial
  primer
ASTKGPSVFPLAPCSRSTSESTAALGGS

SEQ ID NO: 255 - DNA, 84 bp, Artificial
  primer
gctagcaccaagggcccatcggtcttccccctggcgccctgctccaggagcacctctgggggcacagcggccctgggcggatcc

SEQ ID NO: 256 - protein, 28 aa, Artificial
  primer
ASTKGPSVFPLAPCSRSTSGGTAALGGS

SEQ ID NO: 257 - DNA, 84 bp, Artificial
  primer
gctagcaccaagggcccatcggtcttccccctggtgccctgctccaggagcgtctctgagggcacagcggccctgggcggatcc

SEQ ID NO: 258 - protein, 28 aa, Artificial
  primer
ASTKGPSVFPLVPCSRSVSEGTAALGGS

SEQ ID NO: 259 - DNA, 87 bp, Artificial
  primer
gggagtgcatccgccccaacccttttccccctcgtctcctgtgagaattccccgtcggatacgagcagcgtggccgttggcggatcc

SEQ ID NO: 260 - protein, 29 aa, Artificial
  primer
GSASAPTLFPLVSCENSPSDTSSVAVGGS

SEQ ID NO: 261 - DNA, 1860 bp, Artificial
  Synthetic construct of 281VL4-A1(118-143)GS-281
atgaagcacctgtggttcttcctcctgctggtggcggctcccagatgggtcctgtccgaggtccagctggtgcagtctgggtctgagctgaagaagcctgggtcctcggtgaaggtctcctgcaaggcttctggaggcacctccaggagctttgctatcagctgggtgcgacaggcccctggacaaggacttgagtggatgggagggatcatccctatctttggtccagcaaactacgcacagaagttccagggcagagtcacgattaccgcggacgaatccacgagcacagcctacatggagctgagtagcctgagatctgaggacacggccgtgtattactgtgcgaggcacgctattgctatgggttggggagttattacaacgaactactttgactcctggggccaagggacaatggtcaccgtctcctcagctagcccgaccagccccaaggtcttcccgctgagcctctgcagcacccagccagatgggaacgtggtcatcgccggatcccaggtgcagctgcaggagtcgggcccaggactggtgaagccttcggagaccctgtccctcacctgcactgtctctggtggctccatcagtggttactactggagctggatccggcagcccccagggaagggactggagtggattgggtatatctattacagtgggagcaccaactacaatccctccctcaagagtcgagtcaccatatcagtagacacgtccaagaaccagttctccctgaagctgaattctgtgaccgctgcggacacggccgtgtattactgtgcgagagcccccttgcacggtgactacaaatggttccacccctggggccagggaaccctggtcaccgtctcctcagctagcaccaagggcccatccgtcttccccctggcgccctgctccaggagcacctccgagagcacagccgccctgggctgcctggtcaaggactacttccccgaaccggtgacggtgtcgtggaactcaggcgccctgaccagcggcgtgcacaccttcccggctgtcctacagtcctcaggactctactccctcagcagcgtggtgaccgtgccctccagcagcttgggcacgaagacctacacctgcaacgtagatcacaagcccagcaacaccaaggtggacaagagagttgagtccaaatatggtcccccatgcccatcatgcccagcacctgagttcctggggggaccatcagtcttcctgttccccccaaaacccaaggacactctcatgatctcccggacccctgaggtcacgtgcgtggtggtggacgtgagccaggaagaccccgaggtccagttcaactggtacgtggatggcgtggaggtgcataatgccaagacaaagccgcgggaggagcagttcaacagcacgtaccgtgtggtcagcgtcctcaccgtcctgcaccaggactggctgaacggcaaggagtacaagtgcaaggtctccaacaaaggcctcccgtcctccatcgagaaaaccatctccaaagccaaagggcagccccgagagccacaggtgtacaccctgcccccatcccaggaggagatgaccaagaaccaggtcagcctgacctgcctggtcaaaggcttctaccccagcgacatcgccgtggagtgggagagcaatgggcagccggagaacaactacaagaccacgcctcccgtgctggactccgacggctccttcttcctctacagcaggctaaccgtggacaagagcaggtggcaggaggggaatgtcttctcatgctccgtgatgcatgaggctctgcacaaccactacacacagaagagcctctccctgtctctgggtaaatga

SEQ ID NO: 262 - protein, 619 aa, Artificial
  Synthetic construct of 281VL4-A1(118-143)GS-281
MKHLWFFLLLVAAPRWVLSEVQLVQSGSELKKPGSSVKVSCKASGGTSRSFAISWVRQAPGQGLEWMGGIIPIFGPANYAQKFQGRVTITADESTSTAYMELSSLRSEDTAVYYCARHAIAMGWGVITTNYFDSWGQGTMVTVSSASPTSPKVFPLSLCSTQPDGNVVIAGSQVQLQESGPGLVKPSETLSLTCTVSGGSISGYYWSWIRQPPGKGLEWIGYIYYSGSTNYNPSLKSRVTISVDTSKNQFSLKLNSVTAADTAVYYCARAPLHGDYKWFHPWGQGTLVTVSSASTKGPSVFPLAPCSRSTSESTAALGCLVKDYFPEPVTVSWNSGALTSGVHTFPAVLQSSGLYSLSSVVTVPSSSLGTKTYTCNVDHKPSNTKVDKRVESKYGPPCPSCPAPEFLGGPSVFLFPPKPKDTLMISRTPEVTCVVVDVSQEDPEVQFNWYVDGVEVHNAKTKPREEQFNSTYRVVSVLTVLHQDWLNGKEYKCKVSNKGLPSSIEKTISKAKGQPREPQVYTLPPSQEEMTKNQVSLTCLVKGFYPSDIAVEWESNGQPENNYKTTPPVLDSDGSFFLYSRLTVDKSRWQEGNVFSCSVMHEALHNHYTQKSLSLSLGK

SEQ ID NO: 263 - DNA, 1860 bp, Artificial
  Synthetic construct of 281VL4-A2(118-143)GS-281
atgaagcacctgtggttcttcctcctgctggtggcggctcccagatgggtcctgtccgaggtccagctggtgcagtctgggtctgagctgaagaagcctgggtcctcggtgaaggtctcctgcaaggcttctggaggcacctccaggagctttgctatcagctgggtgcgacaggcccctggacaaggacttgagtggatgggagggatcatccctatctttggtccagcaaactacgcacagaagttccagggcagagtcacgattaccgcggacgaatccacgagcacagcctacatggagctgagtagcctgagatctgaggacacggccgtgtattactgtgcgaggcacgctattgctatgggttggggagttattacaacgaactactttgactcctggggccaagggacaatggtcaccgtctcctcagctagcccgaccagccccaaggtcttcccgctgagcctctgcagcaccccccaagatgggaacgtggtcgtcgcaggatcccaggtgcagctgcaggagtcgggcccaggactggtgaagccttcggagaccctgtccctcacctgcactgtctctggtggctccatcagtggttactactggagctggatccggcagcccccagggaagggactggagtggattgggtatatctattacagtgggagcaccaactacaatccctccctcaagagtcgagtcaccatatcagtagacacgtccaagaaccagttctccctgaagctgaattctgtgaccgctgcggacacggccgtgtattactgtgcgagagcccccttgcacggtgactacaaatggttccacccctggggccagggaaccctggtcaccgtctcctcagctagcaccaagggcccatccgtcttccccctggcgccctgctccaggagcacctccgagagcacagccgccctgggctgcctggtcaaggactacttccccgaaccggtgacggtgtcgtggaactcaggcgccctgaccagcggcgtgcacaccttcccggctgtcctacagtcctcaggactctactccctcagcagcgtggtgaccgtgccctccagcagcttgggcacgaagacctacacctgcaacgtagatcacaagcccagcaacaccaaggtggacaagagagttgagtccaaatatggtcccccatgcccatcatgcccagcacctgagttcctggggggaccatcagtcttcctgttccccccaaaacccaaggacactctcatgatctcccggacccctgaggtcacgtgcgtggtggtggacgtgagccaggaagaccccgaggtccagttcaactggtacgtggatggcgtggaggtgcataatgccaagacaaagccgcgggaggagcagttcaacagcacgtaccgtgtggtcagcgtcctcaccgtcctgcaccaggactggctgaacggcaaggagtacaagtgcaaggtctccaacaaaggcctcccgtcctccatcgagaaaaccatctccaaagccaaagggcagccccgagagccacaggtgtacaccctgcccccatcccaggaggagatgaccaagaaccaggtcagcctgacctgcctggtcaaaggcttctaccccagcgacatcgccgtggagtgggagagcaatgggcagccggagaacaactacaagaccacgcctcccgtgctggactccgacggctccttcttcctctacagcaggctaaccgtggacaagagcaggtggcaggaggggaatgtcttctcatgctccgtgatgcatgaggctctgcacaaccactacacacagaagagcctctccctgtctctgggtaaatga

SEQ ID NO: 264 - protein, 619 aa, Artificial
  Synthetic construct of 281VL4-A2(118-143)GS-281
MKHLWFFLLLVAAPRWVLSEVQLVQSGSELKKPGSSVKVSCKASGGTSRSFAISWVRQAPGQGLEWMGGIIPIFGPANYAQKFQGRVTITADESTSTAYMELSSLRSEDTAVYYCARHAIAMGWGVITTNYFDSWGQGTMVTVSSASPTSPKVFPLSLCSTPQDGNVVVAGSQVQLQESGPGLVKPSETLSLTCTVSGGSISGYYWSWIRQPPGKGLEWIGYIYYSGSTNYNPSLKSRVTISVDTSKNQFSLKLNSVTAADTAVYYCARAPLHGDYKWFHPWGQGTLVTVSSASTKGPSVFPLAPCSRSTSESTAALGCLVKDYFPEPVTVSWNSGALTSGVHTFPAVLQSSGLYSLSSVVTVPSSSLGTKTYTCNVDHKPSNTKVDKRVESKYGPPCPSCPAPEFLGGPSVFLFPPKPKDTLMISRTPEVTCVVVDVSQEDPEVQFNWYVDGVEVHNAKTKPREEQFNSTYRVVSVLTVLHQDWLNGKEYKCKVSNKGLPSSIEKTISKAKGQPREPQVYTLPPSQEEMTKNQVSLTCLVKGFYPSDIAVEWESNGQPENNYKTTPPVLDSDGSFFLYSRLTVDKSRWQEGNVFSCSVMHEALHNHYTQKSLSLSLGK

SEQ ID NO: 265 - DNA, 1869 bp, Artificial
  Synthetic construct of 281VL4-E(118-143)GS-281
atgaagcacctgtggttcttcctcctgctggtggcggctcccagatgggtcctgtccgaggtccagctggtgcagtctgggtctgagctgaagaagcctgggtcctcggtgaaggtctcctgcaaggcttctggaggcacctccaggagctttgctatcagctgggtgcgacaggcccctggacaaggacttgagtggatgggagggatcatccctatctttggtccagcaaactacgcacagaagttccagggcagagtcacgattaccgcggacgaatccacgagcacagcctacatggagctgagtagcctgagatctgaggacacggccgtgtattactgtgcgaggcacgctattgctatgggttggggagttattacaacgaactactttgactcctggggccaagggacaatggtcaccgtctcctcagctagcacacagagcccatccgtcttccccttgacccgctgctgcaaaaacattccctccaatgccacctccgtgactctgggcggatcccaggtgcagctgcaggagtcgggcccaggactggtgaagccttcggagaccctgtccctcacctgcactgtctctggtggctccatcagtggttactactggagctggatccggcagcccccagggaagggactggagtggattgggtatatctattacagtgggagcaccaactacaatccctccctcaagagtcgagtcaccatatcagtagacacgtccaagaaccagttctccctgaagctgaattctgtgaccgctgcggacacggccgtgtattactgtgcgagagcccccttgcacggtgactacaaatggttccacccctggggccagggaaccctggtcaccgtctcctcagctagcaccaagggcccatccgtcttccccctggcgccctgctccaggagcacctccgagagcacagccgccctgggctgcctggtcaaggactacttccccgaaccggtgacggtgtcgtggaactcaggcgccctgaccagcggcgtgcacaccttcccggctgtcctacagtcctcaggactctactccctcagcagcgtggtgaccgtgccctccagcagcttgggcacgaagacctacacctgcaacgtagatcacaagcccagcaacaccaaggtggacaagagagttgagtccaaatatggtcccccatgcccatcatgcccagcacctgagttcctggggggaccatcagtcttcctgttccccccaaaacccaaggacactctcatgatctcccggacccctgaggtcacgtgcgtggtggtggacgtgagccaggaagaccccgaggtccagttcaactggtacgtggatggcgtggaggtgcataatgccaagacaaagccgcgggaggagcagttcaacagcacgtaccgtgtggtcagcgtcctcaccgtcctgcaccaggactggctgaacggcaaggagtacaagtgcaaggtctccaacaaaggcctcccgtcctccatcgagaaaaccatctccaaagccaaagggcagccccgagagccacaggtgtacaccctgcccccatcccaggaggagatgaccaagaaccaggtcagcctgacctgcctggtcaaaggcttctaccccagcgacatcgccgtggagtgggagagcaatgggcagccggagaacaactacaagaccacgcctcccgtgctggactccgacggctccttcttcctctacagcaggctaaccgtggacaagagcaggtggcaggaggggaatgtcttctcatgctccgtgatgcatgaggctctgcacaaccactacacacagaagagcctctccctgtctctgggtaaatga

SEQ ID NO: 266 - protein, 622 aa, Artificial [sequence omitted]

SEQ ID NO: 267 - DNA, 1863 bp, Artificial
  Synthetic construct of 281VL4-G1(118-143)GS-281
atgaagcacctgtggttcttcctcctgctggtggcggctcccagatgggtcctgtccgaggtccagctggtgcagtctgggtctgagctgaagaagcctgggtcctcggtgaaggtctcctgcaaggcttctggaggcacctccaggagctttgctatcagctgggtgcgacaggcccctggacaaggacttgagtggatgggagggatcatccctatctttggtccagcaaactacgcacagaagttccagggcagagtcacgattaccgcggacgaatccacgagcacagcctacatggagctgagtagcctgagatctgaggacacggccgtgtattactgtgcgaggcacgctattgctatgggttggggagttattacaacgaactactttgactcctggggccaagggacaatggtcaccgtctcctcagctagcaccaagggcccatcggtcttccccctggcaccctgctccaagagcacctctgggggcacagcggccctgggcggatcccaggtgcagctgcaggagtcgggcccaggactggtgaagccttcggagaccctgtccctcacctgcactgtctctggtggctccatcagtggttactactggagctggatccggcagcccccagggaagggactggagtggattgggtatatctattacagtgggagcaccaactacaatccctccctcaagagtcgagtcaccatatcagtagacacgtccaagaaccagttctccctgaagctgaattctgtgaccgctgcggacacggccgtgtattactgtgcgagagcccccttgcacggtgactacaaatggttccacccctggggccagggaaccctggtcaccgtctcctcagctagcaccaagggcccatccgtcttccccctggcgccctgctccaggagcacctccgagagcacagccgccctgggctgcctggtcaaggactacttccccgaaccggtgacggtgtcgtggaactcaggcgccctgaccagcggcgtgcacaccttcccggctgtcctacagtcctcaggactctactccctcagcagcgtggtgaccgtgccctccagcagcttgggcacgaagacctacacctgcaacgtagatcacaagcccagcaacaccaaggtggacaagagagttgagtccaaatatggtcccccatgcccatcatgcccagcacctgagttcctggggggaccatcagtcttcctgttccccccaaaacccaaggacactctcatgatctcccggacccctgaggtcacgtgcgtggtggtggacgtgagccaggaagaccccgaggtccagttcaactggtacgtggatggcgtggaggtgcataatgccaagacaaagccgcgggaggagcagttcaacagcacgtaccgtgtggtcagcgtcctcaccgtcctgcaccaggactggctgaacggcaaggagtacaagtgcaaggtctccaacaaaggcctcccgtcctccatcgagaaaaccatctccaaagccaaagggcagccccgagagccacaggtgtacaccctgcccccatcccaggaggagatgaccaagaaccaggtcagcctgacctgcctggtcaaaggcttctaccccagcgacatcgccgtggagtgggagagcaatgggcagccggagaacaactacaagaccacgcctcccgtgctggactccgacggctccttcttcctctacagcaggctaaccgtggacaagagcaggtggcaggaggggaatgtcttctcatgctccgtgatgcatgaggctctgcacaaccactacacacagaagagcctctccctgtctctgggtaaatga

SEQ ID NO: 268 - protein, 620 aa, Artificial
  Synthetic construct of 281VL4-G1(118-143)GS-281
MKHLWFFLLLVAAPRWVLSEVQLVQSGSELKKPGSSVKVSCKASGGTSRSFAISWVRQAPGQGLEWMGGIIPIFGPANYAQKFQGRVTITADESTSTAYMELSSLRSEDTAVYYCARHAIAMGWGVITTNYFDSWGQGTMVTVSSASTKGPSVFPLAPCSKSTSGGTAALGGSQVQLQESGPGLVKPSETLSLTCTVSGGSISGYYWSWIRQPPGKGLEWIGYIYYSGSTNYNPSLKSRVTISVDTSKNQFSLKLNSVTAADTAVYYCARAPLHGDYKWFHPWGQGTLVTVSSASTKGPSVFPLAPCSRSTSESTAALGCLVKDYFPEPVTVSWNSGALTSGVHTFPAVLQSSGLYSLSSVVTVPSSSLGTKTYTCNVDHKPSNTKVDKRVESKYGPPCPSCPAPEFLGGPSVFLFPPKPKDTLMISRTPEVTCVVVDVSQEDPEVQFNWYVDGVEVHNAKTKPREEQFNSTYRVVSVLTVLHQDWLNGKEYKCKVSNKGLPSSIEKTISKAKGQPREPQVYTLPPSQEEMTKNQVSLTCLVKGFYPSDIAVEWESNGQPENNYKTTPPVLDSDGSFFLYSRLTVDKSRWQEGNVFSCSVMHEALHNHYTQKSLSLSLGK

SEQ ID NO: 269 - DNA, 1863 bp, Artificial
  Synthetic construct of 281VL4-G2(118-143)GS-281
atgaagcacctgtggttcttcctcctgctggtggcggctcccagatgggtcctgtccgaggtccagctggtgcagtctgggtctgagctgaagaagcctgggtcctcggtgaaggtctcctgcaaggcttctggaggcacctccaggagctttgctatcagctgggtgcgacaggcccctggacaaggacttgagtggatgggagggatcatccctatctttggtccagcaaactacgcacagaagttccagggcagagtcacgattaccgcggacgaatccacgagcacagcctacatggagctgagtagcctgagatctgaggacacggccgtgtattactgtgcgaggcacgctattgctatgggttggggagttattacaacgaactactttgactcctggggccaagggacaatggtcaccgtctcctcagctagcaccaagggcccatcggtcttccccctggcgccctgctccaggagcacctccgagagcacagccgccctgggcggatcccaggtgcagctgcaggagtcgggcccaggactggtgaagccttcggagaccctgtccctcacctgcactgtctctggtggctccatcagtggttactactggagctggatccggcagcccccagggaagggactggagtggattgggtatatctattacagtgggagcaccaactacaatccctccctcaagagtcgagtcaccatatcagtagacacgtccaagaaccagttctccctgaagctgaattctgtgaccgctgcggacacggccgtgtattactgtgcgagagcccccttgcacggtgactacaaatggttccacccctggggccagggaaccctggtcaccgtctcctcagctagcaccaagggcccatccgtcttccccctggcgccctgctccaggagcacctccgagagcacagccgccctgggctgcctggtcaaggactacttccccgaaccggtgacggtgtcgtggaactcaggcgccctgaccagcggcgtgcacaccttcccggctgtcctacagtcctcaggactctactccctcagcagcgtggtgaccgtgccctccagcagcttgggcacgaagacctacacctgcaacgtagatcacaagcccagcaacaccaaggtggacaagagagttgagtccaaatatggtcccccatgcccatcatgcccagcacctgagttcctggggggaccatcagtcttcctgttccccccaaaacccaaggacactctcatgatctcccggacccctgaggtcacgtgcgtggtggtggacgtgagccaggaagaccccgaggtccagttcaactggtacgtggatggcgtggaggtgcataatgccaagacaaagccgcgggaggagcagttcaacagcacgtaccgtgtggtcagcgtcctcaccgtcctgcaccaggactggctgaacggcaaggagtacaagtgcaaggtctccaacaaaggcctcccgtcctccatcgagaaaaccatctccaaagccaaagggcagccccgagagccacaggtgtacaccctgcccccatcccaggaggagatgaccaagaaccaggtcagcctgacctgcctggtcaaaggcttctaccccagcgacatcgccgtggagtgggagagcaatgggcagccggagaacaactacaagaccacgcctcccgtgctggactccgacggctccttcttcctctacagcaggctaaccgtggacaagagcaggtggcaggaggggaatgtcttctcatgctccgtgatgcatgaggctctgcacaaccactacacacagaagagcctctccctgtctctgggtaaatga

SEQ ID NO: 270 - protein, 620 aa, Artificial
  Synthetic construct of 281VL4-G2(118-143)GS-281
MKHLWFFLLLVAAPRWVLSEVQLVQSGSELKKPGSSVKVSCKASGGTSRSFAISWVRQAPGQGLEWMGGIIPIFGPANYAQKFQGRVTITADESTSTAYMELSSLRSEDTAVYYCARHAIAMGWGVITTNYFDSWGQGTMVTVSSASTKGPSVFPLAPCSRSTSESTAALGGSQVQLQESGPGLVKPSETLSLTCTVSGGSISGYYWSWIRQPPGKGLEWIGYIYYSGSTNYNPSLKSRVTISVDTSKNQFSLKLNSVTAADTAVYYCARAPLHGDYKWFHPWGQGTLVTVSSASTKGPSVFPLAPCSRSTSESTAALGCLVKDYFPEPVTVSWNSGALTSGVHTFPAVLQSSGLYSLSSVVTVPSSSLGTKTYTCNVDHKPSNTKVDKRVESKYGPPCPSCPAPEFLGGPSVFLFPPKPKDTLMISRTPEVTCVVVDVSQEDPEVQFNWYVDGVEVHNAKTKPREEQFNSTYRVVSVLTVLHQDWLNGKEYKCKVSNKGLPSSIEKTISKAKGQPREPQVYTLPPSQEEMTKNQVSLTCLVKGFYPSDIAVEWESNGQPENNYKTTPPVLDSDGSFFLYSRLTVDKSRWQEGNVFSCSVMHEALHNHYTQKSLSLSLGK

SEQ ID NO: 271 - DNA, 1863 bp, Artificial
  Synthetic construct of 281VL4-G3(118-143)GS-281
atgaagcacctgtggttcttcctcctgctggtggcggctcccagatgggtcctgtccgaggtccagctggtgcagtctgggtctgagctgaagaagcctgggtcctcggtgaaggtctcctgcaaggcttctggaggcacctccaggagctttgctatcagctgggtgcgacaggcccctggacaaggacttgagtggatgggagggatcatccctatctttggtccagcaaactacgcacagaagttccagggcagagtcacgattaccgcggacgaatccacgagcacagcctacatggagctgagtagcctgagatctgaggacacggccgtgtattactgtgcgaggcacgctattgctatgggttggggagttattacaacgaactactttgactcctggggccaagggacaatggtcaccgtctcctcagctagcaccaagggcccatcggtcttccccctggcgccctgctccaggagcacctctgggggcacagcggccctgggcggatcccaggtgcagctgcaggagtcgggcccaggactggtgaagccttcggagaccctgtccctcacctgcactgtctctggtggctccatcagtggttactactggagctggatccggcagcccccagggaagggactggagtggattgggtatatctattacagtgggagcaccaactacaatccctccctcaagagtcgagtcaccatatcagtagacacgtccaagaaccagttctccctgaagctgaattctgtgaccgctgcggacacggccgtgtattactgtgcgagagcccccttgcacggtgactacaaatggttccacccctggggccagggaaccctggtcaccgtctcctcagctagcaccaagggcccatccgtcttccccctggcgccctgctccaggagcacctccgagagcacagccgccctgggctgcctggtcaaggactacttccccgaaccggtgacggtgtcgtggaactcaggcgccctgaccagcggcgtgcacaccttcccggctgtcctacagtcctcaggactctactccctcagcagcgtggtgaccgtgccctccagcagcttgggcacgaagacctacacctgcaacgtagatcacaagcccagcaacaccaaggtggacaagagagttgagtccaaatatggtcccccatgcccatcatgcccagcacctgagttcctggggggaccatcagtcttcctgttccccccaaaacccaaggacactctcatgatctcccggacccctgaggtcacgtgcgtggtggtggacgtgagccaggaagaccccgaggtccagttcaactggtacgtggatggcgtggaggtgcataatgccaagacaaagccgcgggaggagcagttcaacagcacgtaccgtgtggtcagcgtcctcaccgtcctgcaccaggactggctgaacggcaaggagtacaagtgcaaggtctccaacaaaggcctcccgtcctccatcgagaaaaccatctccaaagccaaagggcagccccgagagccacaggtgtacaccctgcccccatcccaggaggagatgaccaagaaccaggtcagcctgacctgcctggtcaaaggcttctaccccagcgacatcgccgtggagtgggagagcaatgggcagccggagaacaactacaagaccacgcctcccgtgctggactccgacggctccttcttcctctacagcaggctaaccgtggacaagagcaggtggcaggaggggaatgtcttctcatgctccgtgatgcatgaggctctgcacaaccactacacacagaagagcctctccctgtctctgggtaaatga

SEQ ID NO: 272 - protein, 620 aa, Artificial
  Synthetic construct of 281VL4-G3(118-143)GS-281
MKHLWFFLLLVAAPRWVLSEVQLVQSGSELKKPGSSVKVSCKASGGTSRSFAISWVRQAPGQGLEWMGGIIPIFGPANYAQKFQGRVTITADESTSTAYMELSSLRSEDTAVYYCARHAIAMGWGVITTNYFDSWGQGTMVTVSSASTKGPSVFPLAPCSRSTSGGTAALGGSQVQLQESGPGLVKPSETLSLTCTVSGGSISGYYWSWIRQPPGKGLEWIGYIYYSGSTNYNPSLKSRVTISVDTSKNQFSLKLNSVTAADTAVYYCARAPLHGDYKWFHPWGQGTLVTVSSASTKGPSVFPLAPCSRSTSESTAALGCLVKDYFPEPVTVSWNSGALTSGVHTFPAVLQSSGLYSLSSVVTVPSSSLGTKTYTCNVDHKPSNTKVDKRVESKYGPPCPSCPAPEFLGGPSVFLFPPKPKDTLMISRTPEVTCVVVDVSQEDPEVQFNWYVDGVEVHNAKTKPREEQFNSTYRVVSVLTVLHQDWLNGKEYKCKVSNKGLPSSIEKTISKAKGQPREPQVYTLPPSQEEMTKNQVSLTCLVKGFYPSDIAVEWESNGQPENNYKTTPPVLDSDGSFFLYSRLTVDKSRWQEGNVFSCSVMHEALHNHYTQKSLSLSLGK

SEQ ID NO: 273 - DNA, 1863 bp, Artificial
  Synthetic construct of 281VL4-HGP(118-143)GS-281
atgaagcacctgtggttcttcctcctgctggtggcggctcccagatgggtcctgtccgaggtccagctggtgcagtctgggtctgagctgaagaagcctgggtcctcggtgaaggtctcctgcaaggcttctggaggcacctccaggagctttgctatcagctgggtgcgacaggcccctggacaaggacttgagtggatgggagggatcatccctatctttggtccagcaaactacgcacagaagttccagggcagagtcacgattaccgcggacgaatccacgagcacagcctacatggagctgagtagcctgagatctgaggacacggccgtgtattactgtgcgaggcacgctattgctatgggttggggagttattacaacgaactactttgactcctggggccaagggacaatggtcaccgtctcctcagctagcaccaagggcccatcggtcttccccctggtgccctgctccaggagcgtctctgagggcacagcggccctgggcggatcccaggtgcagctgcaggagtcgggcccaggactggtgaagccttcggagaccctgtccctcacctgcactgtctctggtggctccatcagtggttactactggagctggatccggcagcccccagggaagggactggagtggattgggtatatctattacagtgggagcaccaactacaatccctccctcaagagtcgagtcaccatatcagtagacacgtccaagaaccagttctccctgaagctgaattctgtgaccgctgcggacacggccgtgtattactgtgcgagagcccccttgcacggtgactacaaatggttccacccctggggccagggaaccctggtcaccgtctcctcagctagcaccaagggcccatccgtcttccccctggcgccctgctccaggagcacctccgagagcacagccgccctgggctgcctggtcaaggactacttccccgaaccggtgacggtgtcgtggaactcaggcgccctgaccagcggcgtgcacaccttcccggctgtcctacagtcctcaggactctactccctcagcagcgtggtgaccgtgccctccagcagcttgggcacgaagacctacacctgcaacgtagatcacaagcccagcaacaccaaggtggacaagagagttgagtccaaatatggtcccccatgcccatcatgcccagcacctgagttcctggggggaccatcagtcttcctgttccccccaaaacccaaggacactctcatgatctcccggacccctgaggtcacgtgcgtggtggtggacgtgagccaggaagaccccgaggtccagttcaactggtacgtggatggcgtggaggtgcataatgccaagacaaagccgcgggaggagcagttcaacagcacgtaccgtgtggtcagcgtcctcaccgtcctgcaccaggactggctgaacggcaaggagtacaagtgcaaggtctccaacaaaggcctcccgtcctccatcgagaaaaccatctccaaagccaaagggcagccccgagagccacaggtgtacaccctgcccccatcccaggaggagatgaccaagaaccaggtcagcctgacctgcctggtcaaaggcttctaccccagcgacatcgccgtggagtgggagagcaatgggcagccggagaacaactacaagaccacgcctcccgtgctggactccgacggctccttcttcctctacagcaggctaaccgtggacaagagcaggtggcaggaggggaatgtcttctcatgctccgtgatgcatgaggctctgcacaaccactacacacagaagagcctctccctgtctctgggtaaatga

SEQ ID NO: 274 - protein, 620 aa, Artificial
  Synthetic construct of 281VL4-HGP(118-143)GS-281
MKHLWFFLLLVAAPRWVLSEVQLVQSGSELKKPGSSVKVSCKASGGTSRSFAISWVRQAPGQGLEWMGGIIPIFGPANYAQKFQGRVTITADESTSTAYMELSSLRSEDTAVYYCARHAIAMGWGVITTNYFDSWGQGTMVTVSSASTKGPSVFPLVPCSRSVSEGTAALGGSQVQLQESGPGLVKPSETLSLTCTVSGGSISGYYWSWIRQPPGKGLEWIGYIYYSGSTNYNPSLKSRVTISVDTSKNQFSLKLNSVTAADTAVYYCARAPLHGDYKWFHPWGQGTLVTVSSASTKGPSVFPLAPCSRSTSESTAALGCLVKDYFPEPVTVSWNSGALTSGVHTFPAVLQSSGLYSLSSVVTVPSSSLGTKTYTCNVDHKPSNTKVDKRVESKYGPPCPSCPAPEFLGGPSVFLFPPKPKDTLMISRTPEVTCVVVDVSQEDPEVQFNWYVDGVEVHNAKTKPREEQFNSTYRVVSVLTVLHQDWLNGKEYKCKVSNKGLPSSIEKTISKAKGQPREPQVYTLPPSQEEMTKNQVSLTCLVKGFYPSDIAVEWESNGQPENNYKTTPPVLDSDGSFFLYSRLTVDKSRWQEGNVFSCSVMHEALHNHYTQKSLSLSLGK

SEQ ID NO: 275 - DNA, 49 bp, Artificial
  primer
ctagctagctgaggagacggtgaccagggttccctggccccaggggtgg

SEQ ID NO: 276 - DNA, 49 bp, Artificial
  primer
gccctgtggtcctggcaggatcccaggtgcagctgcaggagtcgggccc

SEQ ID NO: 277 - DNA, 48 bp, Artificial
  primer
acgagcagcgtggccgttggcggatcccaggtgcagctgcaggagtcg

SEQ ID NO: 278 - DNA, 49 bp, Artificial
  primer
catatcagggtgcagacacccaaaggataacagccctgtggtcctggca

SEQ ID NO: 279 - DNA, 49 bp, Artificial
  primer
ctcgtctcctgtgagaattccccgtcggatacgagcagcgtggccgttg

SEQ ID NO: 280 - DNA, 49 bp, Artificial
  primer
gcacccaccaaggctccggatgtgttccccatcatatcagggtgcagac

SEQ ID NO: 281 - DNA, 49 bp, Artificial
  primer
gggagtgcatccgccccaacccttttccccctcgtctcctgtgagaatt

SEQ ID NO: 282 - DNA, 49 bp, Artificial
  primer
catccggagccttggtgggtgctgaggagacggtgaccattgtcccttg

SEQ ID NO: 283 - DNA, 49 bp, Artificial
  primer
gggttggggcggatgcactccctgaggagacggtgaccattgtcccttg

SEQ ID NO: 284 - DNA, 1866 bp, Artificial
  Synthetic construct of 281VL4-D(118-144)GS-281
atgaagcacctgtggttcttcctcctgctggtggcggctcccagatgggtcctgtccgaggtccagctggtgcagtctgggtctgagctgaagaagcctgggtcctcggtgaaggtctcctgcaaggcttctggaggcacctccaggagctttgctatcagctgggtgcgacaggcccctggacaaggacttgagtggatgggagggatcatccctatctttggtccagcaaactacgcacagaagttccagggcagagtcacgattaccgcggacgaatccacgagcacagcctacatggagctgagtagcctgagatctgaggacacggccgtgtattactgtgcgaggcacgctattgctatgggttggggagttattacaacgaactactttgactcctggggccaagggacaatggtcaccgtctcctcagcacccaccaaggctccggatgtgttccccatcatatcagggtgcagacacccaaaggataacagccctgtggtcctggcaggatcccaggtgcagctgcaggagtcgggcccaggactggtgaagccttcggagaccctgtccctcacctgcactgtctctggtggctccatcagtggttactactggagctggatccggcagcccccagggaagggactggagtggattgggtatatctattacagtgggagcaccaactacaatccctccctcaagagtcgagtcaccatatcagtagacacgtccaagaaccagttctccctgaagctgaattctgtgaccgctgcggacacggccgtgtattactgtgcgagagcccccttgcacggtgactacaaatggttccacccctggggccagggaaccctggtcaccgtctcctcagctagcaccaagggcccatccgtcttccccctggcgccctgctccaggagcacctccgagagcacagccgccctgggctgcctggtcaaggactacttccccgaaccggtgacggtgtcgtggaactcaggcgccctgaccagcggcgtgcacaccttcccggctgtcctacagtcctcaggactctactccctcagcagcgtggtgaccgtgccctccagcagcttgggcacgaagacctacacctgcaacgtagatcacaagcccagcaacaccaaggtggacaagagagttgagtccaaatatggtcccccatgcccatcatgcccagcacctgagttcctggggggaccatcagtcttcctgttccccccaaaacccaaggacactctcatgatctcccggacccctgaggtcacgtgcgtggtggtggacgtgagccaggaagaccccgaggtccagttcaactggtacgtggatggcgtggaggtgcataatgccaagacaaagccgcgggaggagcagttcaacagcacgtaccgtgtggtcagcgtcctcaccgtcctgcaccaggactggctgaacggcaaggagtacaagtgcaaggtctccaacaaaggcctcccgtcctccatcgagaaaaccatctccaaagccaaagggcagccccgagagccacaggtgtacaccctgcccccatcccaggaggagatgaccaagaaccaggtcagcctgacctgcctggtcaaaggcttctaccccagcgacatcgccgtggagtgggagagcaatgggcagccggagaacaactacaagaccacgcctcccgtgctggactccgacggctccttcttcctctacagcaggctaaccgtggacaagagcaggtggcaggaggggaatgtcttctcatgctccgtgatgcatgaggctctgcacaaccactacacacagaagagcctctccctgtctctgggtaaatga

SEQ ID NO: 285 - protein, 621 aa, Artificial
  Synthetic construct of 281VL4-D(118-143)GS-281
MKHLWFFLLLVAAPRWVLSEVQLVQSGSELKKPGSSVKVSCKASGGTSRSFAISWVRQAPGQGLEWMGGIIPIFGPANYAQKFQGRVTITADESTSTAYMELSSLRSEDTAVYYCARHAIAMGWGVITTNYFDSWGQGTMVTVSSAPTKAPDVFPIISGCRHPKDNSPVVLAGSQVQLQESGPGLVKPSETLSLTCTVSGGSISGYYWSWIRQPPGKGLEWIGYIYYSGSTNYNPSLKSRVTISVDTSKNQFSLKLNSVTAADTAVYYCARAPLHGDYKWFHPWGQGTLVTVSSASTKGPSVFPLAPCSRSTSESTAALGCLVKDYFPEPVTVSWNSGALTSGVHTFPAVLQSSGLYSLSSVVTVPSSSLGTKTYTCNVDHKPSNTKVDKRVESKYGPPCPSCPAPEFLGGPSVFLFPPKPKDTLMISRTPEVTCVVVDVSQEDPEVQFNWYVDGVEVHNAKTKPREEQFNSTYRVVSVLTVLHQDWLNGKEYKCKVSNKGLPSSIEKTISKAKGQPREPQVYTLPPSQEEMTKNQVSLTCLVKGFYPSDIAVEWESNGQPENNYKTTPPVLDSDGSFFLYSRLTVDKSRWQEGNVFSCSVMHEALHNHYTQKSLSLSLGK

SEQ ID NO: 286 - DNA, 1866 bp, Artificial
  Synthetic construct of 281VL4-M(118-143)GS-281
atgaagcacctgtggttcttcctcctgctggtggcggctcccagatgggtcctgtccgaggtccagctggtgcagtctgggtctgagctgaagaagcctgggtcctcggtgaaggtctcctgcaaggcttctggaggcacctccaggagctttgctatcagctgggtgcgacaggcccctggacaaggacttgagtggatgggagggatcatccctatctttggtccagcaaactacgcacagaagttccagggcagagtcacgattaccgcggacgaatccacgagcacagcctacatggagctgagtagcctgagatctgaggacacggccgtgtattactgtgcgaggcacgctattgctatgggttggggagttattacaacgaactactttgactcctggggccaagggacaatggtcaccgtctcctcagggagtgcatccgccccaacccttttccccctcgtctcctgtgagaattccccgtcggatacgagcagcgtggccgttggcggatcccaggtgcagctgcaggagtcgggcccaggactggtgaagccttcggagaccctgtccctcacctgcactgtctctggtggctccatcagtggttactactggagctggatccggcagcccccagggaagggactggagtggattgggtatatctattacagtgggagcaccaactacaatccctccctcaagagtcgagtcaccatatcagtagacacgtccaagaaccagttctccctgaagctgaattctgtgaccgctgcggacacggccgtgtattactgtgcgagagcccccttgcacggtgactacaaatggttccacccctggggccagggaaccctggtcaccgtctcctcagctagcaccaagggcccatccgtcttccccctggcgccctgctccaggagcacctccgagagcacagccgccctgggctgcctggtcaaggactacttccccgaaccggtgacggtgtcgtggaactcaggcgccctgaccagcggcgtgcacaccttcccggctgtcctacagtcctcaggactctactccctcagcagcgtggtgaccgtgccctccagcagcttgggcacgaagacctacacctgcaacgtagatcacaagcccagcaacaccaaggtggacaagagagttgagtccaaatatggtcccccatgcccatcatgcccagcacctgagttcctggggggaccatcagtcttcctgttccccccaaaacccaaggacactctcatgatctcccggacccctgaggtcacgtgcgtggtggtggacgtgagccaggaagaccccgaggtccagttcaactggtacgtggatggcgtggaggtgcataatgccaagacaaagccgcgggaggagcagttcaacagcacgtaccgtgtggtcagcgtcctcaccgtcctgcaccaggactggctgaacggcaaggagtacaagtgcaaggtctccaacaaaggcctcccgtcctccatcgagaaaaccatctccaaagccaaagggcagccccgagagccacaggtgtacaccctgcccccatcccaggaggagatgaccaagaaccaggtcagcctgacctgcctggtcaaaggcttctaccccagcgacatcgccgtggagtgggagagcaatgggcagccggagaacaactacaagaccacgcctcccgtgctggactccgacggctccttcttcctctacagcaggctaaccgtggacaagagcaggtggcaggaggggaatgtcttctcatgctccgtgatgcatgaggctctgcacaaccactacacacagaagagcctctccctgtctctgggtaaatga

SEQ ID NO: 287 - protein, 619 aa, Artificial
  Synthetic construct of 281VL4-M(118-143)GS-281
MKHLWFFLLLVAAPRWVLSEVQLVQSGSELKKPGSSVKVSCKASGGTSRSFAISWVRQAPGQGLEWMGGIIPIFGPANYAQKFQGRVTITADESTSTAYMELSSLRSEDTAVYYCARHAIAMGWGVITTNYFDSWGQGTMVTVSSGSASAPTLFPLVSCENSPSDTSSVAVGQVQLQESGPGLVKPSETLSLTCTVSGGSISGYYWSWIRQPPGKGLEWIGYIYYSGSTNYNPSLKSRVTISVDTSKNQFSLKLNSVTAADTAVYYCARAPLHGDYKWFHPWGQGTLVTVSSASTKGPSVFPLAPCSRSTSESTAALGCLVKDYFPEPVTVSWNSGALTSGVHTFPAVLQSSGLYSLSSVVTVPSSSLGTKTYTCNVDHKPSNTKVDKRVESKYGPPCPSCPAPEFLGGPSVFLFPPKPKDTLMISRTPEVTCVVVDVSQEDPEVQFNWYVDGVEVHNAKTKPREEQFNSTYRVVSVLTVLHQDWLNGKEYKCKVSNKGLPSSIEKTISKAKGQPREPQVYTLPPSQEEMTKNQVSLTCLVKGFYPSDIAVEWESNGQPENNYKTTPPVLDSDGSFFLYSRLTVDKSRWQEGNVFSCSVMHEALHNHYTQKSLSLSLGK

SEQ ID NO: 288 - DNA, 81 bp, Artificial
  primer
gctagcaccaagggcccatcggtcttccccctggcgccctgctccaggagcacctccgagagcacagccgccctgggatcc

SEQ ID NO: 289 - protein, 27 aa, Artificial
  primer
ASTKGPSVFPLAPCSRSTSESTAALGS

SEQ ID NO: 290 - DNA, 78 bp, Artificial
  primer
gctagcaccaagggcccatcggtcttccccctggcgccctgctccaggagcacctccgagagcacagccgccggatcc

SEQ ID NO: 291 - protein, 26 aa, Artificial
  primer
ASTKGPSVFPLAPCSRSTSESTAAGS

SEQ ID NO: 292 - DNA, 75 bp, Artificial
  primer
gctagcaccaagggcccatcggtcttccccctggcgccctgctccaggagcacctccgagagcacagccggatcc

SEQ ID NO: 293 - protein, 25 aa, Artificial
  primer
ASTKGPSVFPLAPCSRSTSESTAGS

SEQ ID NO: 294 - DNA, 72 bp, Artificial
  primer
gctagcaccaagggcccatcggtcttccccctggcgccctgctccaggagcacctccgagagcacaggatcc

SEQ ID NO: 295 - protein, 24 aa, Artificial
  primer
ASTKGPSVFPLAPCSRSTSESTGS

SEQ ID NO: 296 - DNA, 69 bp, Artificial
  primer
gctagcaccaagggcccatcggtcttccccctggcgccctgctccaggagcacctccgagagcggatcc

SEQ ID NO: 297 - protein, 23 aa, Artificial
  primer
ASTKGPSVFPLAPCSRSTSESGS

SEQ ID NO: 298 - DNA, 66 bp, Artificial
  primer
gctagcaccaagggcccatcggtcttccccctggcgccctgctccaggagcacctccgagggatcc

SEQ ID NO: 299 - protein, 22 aa, Artificial
  primer
ASTKGPSVFPLAPCSRSTSEGS

SEQ ID NO: 300 - DNA, 63 bp, Artificial
  primer
gctagcaccaagggcccatcggtcttccccctggcgccctgctccaggagcacctccggatcc

SEQ ID NO: 301 - protein, 21 aa, Artificial
  primer
ASTKGPSVFPLAPCSRSTSGS

SEQ ID NO: 302 - DNA, 60 bp, Artificial
  primer
gctagcaccaagggcccatcggtcttccccctggcgccctgctccaggagcaccggatcc

SEQ ID NO: 303 - protein, 20 aa, Artificial
  primer
ASTKGPSVFPLAPCSRSTGS

SEQ ID NO: 304 - DNA, 57 bp, Artificial
  primer
gctagcaccaagggcccatcggtcttccccctggcgccctgctccaggagcggatcc

SEQ ID NO: 305 - protein, 19 aa, Artificial
  primer
ASTKGPSVFPLAPCSRSGS

SEQ ID NO: 306 - DNA, 54 bp, Artificial
  primer
gctagcaccaagggcccatcggtcttccccctggcgccctgctccaggggatcc

SEQ ID NO: 307 - protein, 18 aa, Artificial
  primer
ASTKGPSVFPLAPCSRGS

SEQ ID NO: 308 - DNA, 51 bp, Artificial
  primer
gctagcaccaagggcccatcggtcttccccctggcgccctgctccggatcc

SEQ ID NO: 309 - protein, 17 aa, Artificial
  primer
ASTKGPSVFPLAPCSGS

SEQ ID NO: 310 - DNA, 42 bp, Artificial
  primer
gctagcaccaagggcccatcggtcttccccctggcgccctgc

SEQ ID NO: 311 - protein, 14 aa, Artificial
  primer
ASTKGPSVFPLAPC

SEQ ID NO: 312 - DNA, 1860 bp, Artificial
  Synthetic construct of 281VL4-G2(118-142)GS-281
atgaagcacctgtggttcttcctcctgctggtggcggctcccagatgggtcctgtccgaggtccagctggtgcagtctgggtctgagctgaagaagcctgggtcctcggtgaaggtctcctgcaaggcttctggaggcacctccaggagctttgctatcagctgggtgcgacaggcccctggacaaggacttgagtggatgggagggatcatccctatctttggtccagcaaactacgcacagaagttccagggcagagtcacgattaccgcggacgaatccacgagcacagcctacatggagctgagtagcctgagatctgaggacacggccgtgtattactgtgcgaggcacgctattgctatgggttggggagttattacaacgaactactttgactcctggggccaagggacaatggtcaccgtctcctcagctagcaccaagggcccatcggtcttccccctggcgccctgctccaggagcacctccgagagcacagccgccctgggatcccaggtgcagctgcaggagtcgggcccaggactggtgaagccttcggagaccctgtccctcacctgcactgtctctggtggctccatcagtggttactactggagctggatccggcagcccccagggaagggactggagtggattgggtatatctattacagtgggagcaccaactacaatccctccctcaagagtcgagtcaccatatcagtagacacgtccaagaaccagttctccctgaagctgaattctgtgaccgctgcggacacggccgtgtattactgtgcgagagcccccttgcacggtgactacaaatggttccacccctggggccagggaaccctggtcaccgtctcctcagctagcaccaagggcccatccgtcttccccctggcgccctgctccaggagcacctccgagagcacagccgccctgggctgcctggtcaaggactacttccccgaaccggtgacggtgtcgtggaactcaggcgccctgaccagcggcgtgcacaccttcccggctgtcctacagtcctcaggactctactccctcagcagcgtggtgaccgtgccctccagcagcttgggcacgaagacctacacctgcaacgtagatcacaagcccagcaacaccaaggtggacaagagagttgagtccaaatatggtcccccatgcccatcatgcccagcacctgagttcctggggggaccatcagtcttcctgttccccccaaaacccaaggacactctcatgatctcccggacccctgaggtcacgtgcgtggtggtggacgtgagccaggaagaccccgaggtccagttcaactggtacgtggatggcgtggaggtgcataatgccaagacaaagccgcgggaggagcagttcaacagcacgtaccgtgtggtcagcgtcctcaccgtcctgcaccaggactggctgaacggcaaggagtacaagtgcaaggtctccaacaaaggcctcccgtcctccatcgagaaaaccatctccaaagccaaagggcagccccgagagccacaggtgtacaccctgcccccatcccaggaggagatgaccaagaaccaggtcagcctgacctgcctggtcaaaggcttctaccccagcgacatcgccgtggagtgggagagcaatgggcagccggagaacaactacaagaccacgcctcccgtgctggactccgacggctccttcttcctctacagcaggctaaccgtggacaagagcaggtggcaggaggggaatgtcttctcatgctccgtgatgcatgaggctctgcacaaccactacacacagaagagcctctccctgtctctgggtaaatga

SEQ ID NO: 313 - protein, 619 aa, Artificial
  Synthetic construct of 281VL4-G2(118-142)GS-281
MKHLWFFLLLVAAPRWVLSEVQLVQSGSELKKPGSSVKVSCKASGGTSRSFAISWVRQAPGQGLEWMGGIIPIFGPANYAQKFQGRVTITADESTSTAYMELSSLRSEDTAVYYCARHAIAMGWGVITTNYFDSWGQGTMVTVSSASTKGPSVFPLAPCSRSTSESTAALGSQVQLQESGPGLVKPSETLSLTCTVSGGSISGYYWSWIRQPPGKGLEWIGYIYYSGSTNYNPSLKSRVTISVDTSKNQFSLKLNSVTAADTAVYYCARAPLHGDYKWFHPWGQGTLVTVSSASTKGPSVFPLAPCSRSTSESTAALGCLVKDYFPEPVTVSWNSGALTSGVHTFPAVLQSSGLYSLSSVVTVPSSSLGTKTYTCNVDHKPSNTKVDKRVESKYGPPCPSCPAPEFLGGPSVFLFPPKPKDTLMISRTPEVTCVVVDVSQEDPEVQFNWYVDGVEVHNAKTKPREEQFNSTYRVVSVLTVLHQDWLNGKEYKCKVSNKGLPSSIEKTISKAKGQPREPQVYTLPPSQEEMTKNQVSLTCLVKGFYPSDIAVEWESNGQPENNYKTTPPVLDSDGSFFLYSRLTVDKSRWQEGNVFSCSVMHEALHNHYTQKSLSLSLGK

SEQ ID NO: 314 - DNA, 1857 bp, Artificial
  Synthetic construct of 281VL4-G2(118-141)GS-281
atgaagcacctgtggttcttcctcctgctggtggcggctcccagatgggtcctgtccgaggtccagctggtgcagtctgggtctgagctgaagaagcctgggtcctcggtgaaggtctcctgcaaggcttctggaggcacctccaggagctttgctatcagctgggtgcgacaggcccctggacaaggacttgagtggatgggagggatcatccctatctttggtccagcaaactacgcacagaagttccagggcagagtcacgattaccgcggacgaatccacgagcacagcctacatggagctgagtagcctgagatctgaggacacggccgtgtattactgtgcgaggcacgctattgctatgggttggggagttattacaacgaactactttgactcctggggccaagggacaatggtcaccgtctcctcagctagcaccaagggcccatcggtcttccccctggcgccctgctccaggagcacctccgagagcacagccgccggatcccaggtgcagctgcaggagtcgggcccaggactggtgaagccttcggagaccctgtccctcacctgcactgtctctggtggctccatcagtggttactactggagctggatccggcagcccccagggaagggactggagtggattgggtatatctattacagtgggagcaccaactacaatccctccctcaagagtcgagtcaccatatcagtagacacgtccaagaaccagttctccctgaagctgaattctgtgaccgctgcggacacggccgtgtattactgtgcgagagcccccttgcacggtgactacaaatggttccacccctggggccagggaaccctggtcaccgtctcctcagctagcaccaagggcccatccgtcttccccctggcgccctgctccaggagcacctccgagagcacagccgccctgggctgcctggtcaaggactacttccccgaaccggtgacggtgtcgtggaactcaggcgccctgaccagcggcgtgcacaccttcccggctgtcctacagtcctcaggactctactccctcagcagcgtggtgaccgtgccctccagcagcttgggcacgaagacctacacctgcaacgtagatcacaagcccagcaacaccaaggtggacaagagagttgagtccaaatatggtcccccatgcccatcatgcccagcacctgagttcctggggggaccatcagtcttcctgttccccccaaaacccaaggacactctcatgatctcccggacccctgaggtcacgtgcgtggtggtggacgtgagccaggaagaccccgaggtccagttcaactggtacgtggatggcgtggaggtgcataatgccaagacaaagccgcgggaggagcagttcaacagcacgtaccgtgtggtcagcgtcctcaccgtcctgcaccaggactggctgaacggcaaggagtacaagtgcaaggtctccaacaaaggcctcccgtcctccatcgagaaaaccatctccaaagccaaagggcagccccgagagccacaggtgtacaccctgcccccatcccaggaggagatgaccaagaaccaggtcagcctgacctgcctggtcaaaggcttctaccccagcgacatcgccgtggagtgggagagcaatgggcagccggagaacaactacaagaccacgcctcccgtgctggactccgacggctccttcttcctctacagcaggctaaccgtggacaagagcaggtggcaggaggggaatgtcttctcatgctccgtgatgcatgaggctctgcacaaccactacacacagaagagcctctccctgtctctgggtaaatga

SEQ ID NO: 315 - protein, 618 aa, Artificial
  Synthetic construct of 281VL4-G2(118-141)GS-281
MKHLWFFLLLVAAPRWVLSEVQLVQSGSELKKPGSSVKVSCKASGGTSRSFAISWVRQAPGQGLEWMGGIIPIFGPANYAQKFQGRVTITADESTSTAYMELSSLRSEDTAVYYCARHAIAMGWGVITTNYFDSWGQGTMVTVSSASTKGPSVFPLAPCSRSTSESTAAGSQVQLQESGPGLVKPSETLSLTCTVSGGSISGYYWSWIRQPPGKGLEWIGYIYYSGSTNYNPSLKSRVTISVDTSKNQFSLKLNSVTAADTAVYYCARAPLHGDYKWFHPWGQGTLVTVSSASTKGPSVFPLAPCSRSTSESTAALGCLVKDYFPEPVTVSWNSGALTSGVHTFPAVLQSSGLYSLSSVVTVPSSSLGTKTYTCNVDHKPSNTKVDKRVESKYGPPCPSCPAPEFLGGPSVFLFPPKPKDTLMISRTPEVTCVVVDVSQEDPEVQFNWYVDGVEVHNAKTKPREEQFNSTYRVVSVLTVLHQDWLNGKEYKCKVSNKGLPSSIEKTISKAKGQPREPQVYTLPPSQEEMTKNQVSLTCLVKGFYPSDIAVEWESNGQPENNYKTTPPVLDSDGSFFLYSRLTVDKSRWQEGNVFSCSVMHEALHNHYTQKSLSLSLGK

SEQ ID NO: 316 - DNA, 1854 bp, Artificial
  Synthetic construct of 281VL4-G2(118-140)GS-281
atgaagcacctgtggttcttcctcctgctggtggcggctcccagatgggtcctgtccgaggtccagctggtgcagtctgggtctgagctgaagaagcctgggtcctcggtgaaggtctcctgcaaggcttctggaggcacctccaggagctttgctatcagctgggtgcgacaggcccctggacaaggacttgagtggatgggagggatcatccctatctttggtccagcaaactacgcacagaagttccagggcagagtcacgattaccgcggacgaatccacgagcacagcctacatggagctgagtagcctgagatctgaggacacggccgtgtattactgtgcgaggcacgctattgctatgggttggggagttattacaacgaactactttgactcctggggccaagggacaatggtcaccgtctcctcagctagcaccaagggcccatcggtcttccccctggcgccctgctccaggagcacctccgagagcacagccggatcccaggtgcagctgcaggagtcgggcccaggactggtgaagccttcggagaccctgtccctcacctgcactgtctctggtggctccatcagtggttactactggagctggatccggcagcccccagggaagggactggagtggattgggtatatctattacagtgggagcaccaactacaatccctccctcaagagtcgagtcaccatatcagtagacacgtccaagaaccagttctccctgaagctgaattctgtgaccgctgcggacacggccgtgtattactgtgcgagagcccccttgcacggtgactacaaatggttccacccctggggccagggaaccctggtcaccgtctcctcagctagcaccaagggcccatccgtcttccccctggcgccctgctccaggagcacctccgagagcacagccgccctgggctgcctggtcaaggactacttccccgaaccggtgacggtgtcgtggaactcaggcgccctgaccagcggcgtgcacaccttcccggctgtcctacagtcctcaggactctactccctcagcagcgtggtgaccgtgccctccagcagcttgggcacgaagacctacacctgcaacgtagatcacaagcccagcaacaccaaggtggacaagagagttgagtccaaatatggtcccccatgcccatcatgcccagcacctgagttcctggggggaccatcagtcttcctgttccccccaaaacccaaggacactctcatgatctcccggacccctgaggtcacgtgcgtggtggtggacgtgagccaggaagaccccgaggtccagttcaactggtacgtggatggcgtggaggtgcataatgccaagacaaagccgcgggaggagcagttcaacagcacgtaccgtgtggtcagcgtcctcaccgtcctgcaccaggactggctgaacggcaaggagtacaagtgcaaggtctccaacaaaggcctcccgtcctccatcgagaaaaccatctccaaagccaaagggcagccccgagagccacaggtgtacaccctgcccccatcccaggaggagatgaccaagaaccaggtcagcctgacctgcctggtcaaaggcttctaccccagcgacatcgccgtggagtgggagagcaatgggcagccggagaacaactacaagaccacgcctcccgtgctggactccgacggctccttcttcctctacagcaggctaaccgtggacaagagcaggtggcaggaggggaatgtcttctcatgctccgtgatgcatgaggctctgcacaaccactacacacagaagagcctctccctgtctctgggtaaatga

SEQ ID NO: 317 - protein, 617 aa, Artificial
  Synthetic construct of 281VL4-G2(118-140)GS-281
MKHLWFFLLLVAAPRWVLSEVQLVQSGSELKKPGSSVKVSCKASGGTSRSFAISWVRQAPGQGLEWMGGIIPIFGPANYAQKFQGRVTITADESTSTAYMELSSLRSEDTAVYYCARHAIAMGWGVITTNYFDSWGQGTMVTVSSASTKGPSVFPLAPCSRSTSESTAGSQVQLQESGPGLVKPSETLSLTCTVSGGSISGYYWSWIRQPPGKGLEWIGYIYYSGSTNYNPSLKSRVTISVDTSKNQFSLKLNSVTAADTAVYYCARAPLHGDYKWFHPWGQGTLVTVSSASTKGPSVFPLAPCSRSTSESTAALGCLVKDYFPEPVTVSWNSGALTSGVHTFPAVLQSSGLYSLSSVVTVPSSSLGTKTYTCNVDHKPSNTKVDKRVESKYGPPCPSCPAPEFLGGPSVFLFPPKPKDTLMISRTPEVTCVVVDVSQEDPEVQFNWYVDGVEVHNAKTKPREEQFNSTYRVVSVLTVLHQDWLNGKEYKCKVSNKGLPSSIEKTISKAKGQPREPQVYTLPPSQEEMTKNQVSLTCLVKGFYPSDIAVEWESNGQPENNYKTTPPVLDSDGSFFLYSRLTVDKSRWQEGNVFSCSVMHEALHNHYTQKSLSLSLGK

SEQ ID NO: 318 - DNA, 1851 bp, Artificial
  Synthetic construct of 281VL4-G2(118-139)GS-281
atgaagcacctgtggttcttcctcctgctggtggcggctcccagatgggtcctgtccgaggtccagctggtgcagtctgggtctgagctgaagaagcctgggtcctcggtgaaggtctcctgcaaggcttctggaggcacctccaggagctttgctatcagctgggtgcgacaggcccctggacaaggacttgagtggatgggagggatcatccctatctttggtccagcaaactacgcacagaagttccagggcagagtcacgattaccgcggacgaatccacgagcacagcctacatggagctgagtagcctgagatctgaggacacggccgtgtattactgtgcgaggcacgctattgctatgggttggggagttattacaacgaactactttgactcctggggccaagggacaatggtcaccgtctcctcagctagcaccaagggcccatcggtcttccccctggcgccctgctccaggagcacctccgagagcacaggatcccaggtgcagctgcaggagtcgggcccaggactggtgaagccttcggagaccctgtccctcacctgcactgtctctggtggctccatcagtggttactactggagctggatccggcagcccccagggaagggactggagtggattgggtatatctattacagtgggagcaccaactacaatccctccctcaagagtcgagtcaccatatcagtagacacgtccaagaaccagttctccctgaagctgaattctgtgaccgctgcggacacggccgtgtattactgtgcgagagcccccttgcacggtgactacaaatggttccacccctggggccagggaaccctggtcaccgtctcctcagctagcaccaagggcccatccgtcttccccctggcgccctgctccaggagcacctccgagagcacagccgccctgggctgcctggtcaaggactacttccccgaaccggtgacggtgtcgtggaactcaggcgccctgaccagcggcgtgcacaccttcccggctgtcctacagtcctcaggactctactccctcagcagcgtggtgaccgtgccctccagcagcttgggcacgaagacctacacctgcaacgtagatcacaagcccagcaacaccaaggtggacaagagagttgagtccaaatatggtcccccatgcccatcatgcccagcacctgagttcctggggggaccatcagtcttcctgttccccccaaaacccaaggacactctcatgatctcccggacccctgaggtcacgtgcgtggtggtggacgtgagccaggaagaccccgaggtccagttcaactggtacgtggatggcgtggaggtgcataatgccaagacaaagccgcgggaggagcagttcaacagcacgtaccgtgtggtcagcgtcctcaccgtcctgcaccaggactggctgaacggcaaggagtacaagtgcaaggtctccaacaaaggcctcccgtcctccatcgagaaaaccatctccaaagccaaagggcagccccgagagccacaggtgtacaccctgcccccatcccaggaggagatgaccaagaaccaggtcagcctgacctgcctggtcaaaggcttctaccccagcgacatcgccgtggagtgggagagcaatgggcagccggagaacaactacaagaccacgcctcccgtgctggactccgacggctccttcttcctctacagcaggctaaccgtggacaagagcaggtggcaggaggggaatgtcttctcatgctccgtgatgcatgaggctctgcacaaccactacacacagaagagcctctccctgtctctgggtaaatga

SEQ ID NO: 319 - protein, 616 aa, Artificial
  Synthetic construct of 281VL4-G2(118-139)GS-281
MKHLWFFLLLVAAPRWVLSEVQLVQSGSELKKPGSSVKVSCKASGGTSRSFAISWVRQAPGQGLEWMGGIIPIFGPANYAQKFQGRVTITADESTSTAYMELSSLRSEDTAVYYCARHAIAMGWGVITTNYFDSWGQGTMVTVSSASTKGPSVFPLAPCSRSTSESTGSQVQLQESGPGLVKPSETLSLTCTVSGGSISGYYWSWIRQPPGKGLEWIGYIYYSGSTNYNPSLKSRVTISVDTSKNQFSLKLNSVTAADTAVYYCARAPLHGDYKWFHPWGQGTLVTVSSASTKGPSVFPLAPCSRSTSESTAALGCLVKDYFPEPVTVSWNSGALTSGVHTFPAVLQSSGLYSLSSVVTVPSSSLGTKTYTCNVDHKPSNTKVDKRVESKYGPPCPSCPAPEFLGGPSVFLFPPKPKDTLMISRTPEVTCVVVDVSQEDPEVQFNWYVDGVEVHNAKTKPREEQFNSTYRVVSVLTVLHQDWLNGKEYKCKVSNKGLPSSIEKTISKAKGQPREPQVYTLPPSQEEMTKNQVSLTCLVKGFYPSDIAVEWESNGQPENNYKTTPPVLDSDGSFFLYSRLTVDKSRWQEGNVFSCSVMHEALHNHYTQKSLSLSLGK

SEQ ID NO: 320 - DNA, 1848 bp, Artificial
  Synthetic construct of 281VL4-G2(118-138)GS-281
atgaagcacctgtggttcttcctcctgctggtggcggctcccagatgggtcctgtccgaggtccagctggtgcagtctgggtctgagctgaagaagcctgggtcctcggtgaaggtctcctgcaaggcttctggaggcacctccaggagctttgctatcagctgggtgcgacaggcccctggacaaggacttgagtggatgggagggatcatccctatctttggtccagcaaactacgcacagaagttccagggcagagtcacgattaccgcggacgaatccacgagcacagcctacatggagctgagtagcctgagatctgaggacacggccgtgtattactgtgcgaggcacgctattgctatgggttggggagttattacaacgaactactttgactcctggggccaagggacaatggtcaccgtctcctcagctagcaccaagggcccatcggtcttccccctggcgccctgctccaggagcacctccgagagcggatcccaggtgcagctgcaggagtcgggcccaggactggtgaagccttcggagaccctgtccctcacctgcactgtctctggtggctccatcagtggttactactggagctggatccggcagcccccagggaagggactggagtggattgggtatatctattacagtgggagcaccaactacaatccctccctcaagagtcgagtcaccatatcagtagacacgtccaagaaccagttctccctgaagctgaattctgtgaccgctgcggacacggccgtgtattactgtgcgagagcccccttgcacggtgactacaaatggttccacccctggggccagggaaccctggtcaccgtctcctcagctagcaccaagggcccatccgtcttccccctggcgccctgctccaggagcacctccgagagcacagccgccctgggctgcctggtcaaggactacttccccgaaccggtgacggtgtcgtggaactcaggcgccctgaccagcggcgtgcacaccttcccggctgtcctacagtcctcaggactctactccctcagcagcgtggtgaccgtgccctccagcagcttgggcacgaagacctacacctgcaacgtagatcacaagcccagcaacaccaaggtggacaagagagttgagtccaaatatggtcccccatgcccatcatgcccagcacctgagttcctggggggaccatcagtcttcctgttccccccaaaacccaaggacactctcatgatctcccggacccctgaggtcacgtgcgtggtggtggacgtgagccaggaagaccccgaggtccagttcaactggtacgtggatggcgtggaggtgcataatgccaagacaaagccgcgggaggagcagttcaacagcacgtaccgtgtggtcagcgtcctcaccgtcctgcaccaggactggctgaacggcaaggagtacaagtgcaaggtctccaacaaaggcctcccgtcctccatcgagaaaaccatctccaaagccaaagggcagccccgagagccacaggtgtacaccctgcccccatcccaggaggagatgaccaagaaccaggtcagcctgacctgcctggtcaaaggcttctaccccagcgacatcgccgtggagtgggagagcaatgggcagccggagaacaactacaagaccacgcctcccgtgctggactccgacggctccttcttcctctacagcaggctaaccgtggacaagagcaggtggcaggaggggaatgtcttctcatgctccgtgatgcatgaggctctgcacaaccactacacacagaagagcctctccctgtctctgggtaaatga

SEQ ID NO: 321 - protein, 615 aa, Artificial
  Synthetic construct of 281VL4-G2(118-138)GS-281
MKHLWFFLLLVAAPRWVLSEVQLVQSGSELKKPGSSVKVSCKASGGTSRSFAISWVRQAPGQGLEWMGGIIPIFGPANYAQKFQGRVTITADESTSTAYMELSSLRSEDTAVYYCARHAIAMGWGVITTNYFDSWGQGTMVTVSSASTKGPSVFPLAPCSRSTSESGSQVQLQESGPGLVKPSETLSLTCTVSGGSISGYYWSWIRQPPGKGLEWIGYIYYSGSTNYNPSLKSRVTISVDTSKNQFSLKLNSVTAADTAVYYCARAPLHGDYKWFHPWGQGTLVTVSSASTKGPSVFPLAPCSRSTSESTAALGCLVKDYFPEPVTVSWNSGALTSGVHTFPAVLQSSGLYSLSSVVTVPSSSLGTKTYTCNVDHKPSNTKVDKRVESKYGPPCPSCPAPEFLGGPSVFLFPPKPKDTLMISRTPEVTCVVVDVSQEDPEVQFNWYVDGVEVHNAKTKPREEQFNSTYRVVSVLTVLHQDWLNGKEYKCKVSNKGLPSSIEKTISKAKGQPREPQVYTLPPSQEEMTKNQVSLTCLVKGFYPSDIAVEWESNGQPENNYKTTPPVLDSDGSFFLYSRLTVDKSRWQEGNVFSCSVMHEALHNHYTQKSLSLSLGK

SEQ ID NO: 322 - DNA, 1845 bp, Artificial
  Synthetic construct of 281VL4-G2(118-137)GS-281
atgaagcacctgtggttcttcctcctgctggtggcggctcccagatgggtcctgtccgaggtccagctggtgcagtctgggtctgagctgaagaagcctgggtcctcggtgaaggtctcctgcaaggcttctggaggcacctccaggagctttgctatcagctgggtgcgacaggcccctggacaaggacttgagtggatgggagggatcatccctatctttggtccagcaaactacgcacagaagttccagggcagagtcacgattaccgcggacgaatccacgagcacagcctacatggagctgagtagcctgagatctgaggacacggccgtgtattactgtgcgaggcacgctattgctatgggttggggagttattacaacgaactactttgactcctggggccaagggacaatggtcaccgtctcctcagctagcaccaagggcccatcggtcttccccctggcgccctgctccaggagcacctccgagggatcccaggtgcagctgcaggagtcgggcccaggactggtgaagccttcggagaccctgtccctcacctgcactgtctctggtggctccatcagtggttactactggagctggatccggcagcccccagggaagggactggagtggattgggtatatctattacagtgggagcaccaactacaatccctccctcaagagtcgagtcaccatatcagtagacacgtccaagaaccagttctccctgaagctgaattctgtgaccgctgcggacacggccgtgtattactgtgcgagagcccccttgcacggtgactacaaatggttccacccctggggccagggaaccctggtcaccgtctcctcagctagcaccaagggcccatccgtcttccccctggcgccctgctccaggagcacctccgagagcacagccgccctgggctgcctggtcaaggactacttccccgaaccggtgacggtgtcgtggaactcaggcgccctgaccagcggcgtgcacaccttcccggctgtcctacagtcctcaggactctactccctcagcagcgtggtgaccgtgccctccagcagcttgggcacgaagacctacacctgcaacgtagatcacaagcccagcaacaccaaggtggacaagagagttgagtccaaatatggtcccccatgcccatcatgcccagcacctgagttcctggggggaccatcagtcttcctgttccccccaaaacccaaggacactctcatgatctcccggacccctgaggtcacgtgcgtggtggtggacgtgagccaggaagaccccgaggtccagttcaactggtacgtggatggcgtggaggtgcataatgccaagacaaagccgcgggaggagcagttcaacagcacgtaccgtgtggtcagcgtcctcaccgtcctgcaccaggactggctgaacggcaaggagtacaagtgcaaggtctccaacaaaggcctcccgtcctccatcgagaaaaccatctccaaagccaaagggcagccccgagagccacaggtgtacaccctgcccccatcccaggaggagatgaccaagaaccaggtcagcctgacctgcctggtcaaaggcttctaccccagcgacatcgccgtggagtgggagagcaatgggcagccggagaacaactacaagaccacgcctcccgtgctggactccgacggctccttcttcctctacagcaggctaaccgtggacaagagcaggtggcaggaggggaatgtcttctcatgctccgtgatgcatgaggctctgcacaaccactacacacagaagagcctctccctgtctctgggtaaatga

SEQ ID NO: 323 - protein, 614 aa, Artificial
  Synthetic construct of 281VL4-G2(118-137)GS-281
MKHLWFFLLLVAAPRWVLSEVQLVQSGSELKKPGSSVKVSCKASGGTSRSFAISWVRQAPGQGLEWMGGIIPIFGPANYAQKFQGRVTITADESTSTAYMELSSLRSEDTAVYYCARHAIAMGWGVITTNYFDSWGQGTMVTVSSASTKGPSVFPLAPCSRSTSEGSQVQLQESGPGLVKPSETLSLTCTVSGGSISGYYWSWIRQPPGKGLEWIGYIYYSGSTNYNPSLKSRVTISVDTSKNQFSLKLNSVTAADTAVYYCARAPLHGDYKWFHPWGQGTLVTVSSASTKGPSVFPLAPCSRSTSESTAALGCLVKDYFPEPVTVSWNSGALTSGVHTFPAVLQSSGLYSLSSVVTVPSSSLGTKTYTCNVDHKPSNTKVDKRVESKYGPPCPSCPAPEFLGGPSVFLFPPKPKDTLMISRTPEVTCVVVDVSQEDPEVQFNWYVDGVEVHNAKTKPREEQFNSTYRVVSVLTVLHQDWLNGKEYKCKVSNKGLPSSIEKTISKAKGQPREPQVYTLPPSQEEMTKNQVSLTCLVKGFYPSDIAVEWESNGQPENNYKTTPPVLDSDGSFFLYSRLTVDKSRWQEGNVFSCSVMHEALHNHYTQKSLSLSLGK

SEQ ID NO: 324 - DNA, 1842 bp, Artificial
  Synthetic construct of 281VL4-G2(118-136)GS-281
atgaagcacctgtggttcttcctcctgctggtggcggctcccagatgggtcctgtccgaggtccagctggtgcagtctgggtctgagctgaagaagcctgggtcctcggtgaaggtctcctgcaaggcttctggaggcacctccaggagctttgctatcagctgggtgcgacaggcccctggacaaggacttgagtggatgggagggatcatccctatctttggtccagcaaactacgcacagaagttccagggcagagtcacgattaccgcggacgaatccacgagcacagcctacatggagctgagtagcctgagatctgaggacacggccgtgtattactgtgcgaggcacgctattgctatgggttggggagttattacaacgaactactttgactcctggggccaagggacaatggtcaccgtctcctcagctagcaccaagggcccatcggtcttccccctggcgccctgctccaggagcacctccggatcccaggtgcagctgcaggagtcgggcccaggactggtgaagccttcggagaccctgtccctcacctgcactgtctctggtggctccatcagtggttactactggagctggatccggcagcccccagggaagggactggagtggattgggtatatctattacagtgggagcaccaactacaatccctccctcaagagtcgagtcaccatatcagtagacacgtccaagaaccagttctccctgaagctgaattctgtgaccgctgcggacacggccgtgtattactgtgcgagagcccccttgcacggtgactacaaatggttccacccctggggccagggaaccctggtcaccgtctcctcagctagcaccaagggcccatccgtcttccccctggcgccctgctccaggagcacctccgagagcacagccgccctgggctgcctggtcaaggactacttccccgaaccggtgacggtgtcgtggaactcaggcgccctgaccagcggcgtgcacaccttcccggctgtcctacagtcctcaggactctactccctcagcagcgtggtgaccgtgccctccagcagcttgggcacgaagacctacacctgcaacgtagatcacaagcccagcaacaccaaggtggacaagagagttgagtccaaatatggtcccccatgcccatcatgcccagcacctgagttcctggggggaccatcagtcttcctgttccccccaaaacccaaggacactctcatgatctcccggacccctgaggtcacgtgcgtggtggtggacgtgagccaggaagaccccgaggtccagttcaactggtacgtggatggcgtggaggtgcataatgccaagacaaagccgcgggaggagcagttcaacagcacgtaccgtgtggtcagcgtcctcaccgtcctgcaccaggactggctgaacggcaaggagtacaagtgcaaggtctccaacaaaggcctcccgtcctccatcgagaaaaccatctccaaagccaaagggcagccccgagagccacaggtgtacaccctgcccccatcccaggaggagatgaccaagaaccaggtcagcctgacctgcctggtcaaaggcttctaccccagcgacatcgccgtggagtgggagagcaatgggcagccggagaacaactacaagaccacgcctcccgtgctggactccgacggctccttcttcctctacagcaggctaaccgtggacaagagcaggtggcaggaggggaatgtcttctcatgctccgtgatgcatgaggctctgcacaaccactacacacagaagagcctctccctgtctctgggtaaatga

SEQ ID NO: 325 - protein, 613 aa, Artificial
  Synthetic construct of 281VL4-G2(118-136)GS-281
MKHLWFFLLLVAAPRWVLSEVQLVQSGSELKKPGSSVKVSCKASGGTSRSFAISWVRQAPGQGLEWMGGIIPIFGPANYAQKFQGRVTITADESTSTAYMELSSLRSEDTAVYYCARHAIAMGWGVITTNYFDSWGQGTMVTVSSASTKGPSVFPLAPCSRSTSGSQVQLQESGPGLVKPSETLSLTCTVSGGSISGYYWSWIRQPPGKGLEWIGYIYYSGSTNYNPSLKSRVTISVDTSKNQFSLKLNSVTAADTAVYYCARAPLHGDYKWFHPWGQGTLVTVSSASTKGPSVFPLAPCSRSTSESTAALGCLVKDYFPEPVTVSWNSGALTSGVHTFPAVLQSSGLYSLSSVVTVPSSSLGTKTYTCNVDHKPSNTKVDKRVESKYGPPCPSCPAPEFLGGPSVFLFPPKPKDTLMISRTPEVTCVVVDVSQEDPEVQFNWYVDGVEVHNAKTKPREEQFNSTYRVVSVLTVLHQDWLNGKEYKCKVSNKGLPSSIEKTISKAKGQPREPQVYTLPPSQEEMTKNQVSLTCLVKGFYPSDIAVEWESNGQPENNYKTTPPVLDSDGSFFLYSRLTVDKSRWQEGNVFSCSVMHEALHNHYTQKSLSLSLGK

SEQ ID NO: 326 - DNA, 1839 bp, Artificial
  Synthetic construct of 281VL4-G2(118-135)GS-281
atgaagcacctgtggttcttcctcctgctggtggcggctcccagatgggtcctgtccgaggtccagctggtgcagtctgggtctgagctgaagaagcctgggtcctcggtgaaggtctcctgcaaggcttctggaggcacctccaggagctttgctatcagctgggtgcgacaggcccctggacaaggacttgagtggatgggagggatcatccctatctttggtccagcaaactacgcacagaagttccagggcagagtcacgattaccgcggacgaatccacgagcacagcctacatggagctgagtagcctgagatctgaggacacggccgtgtattactgtgcgaggcacgctattgctatgggttggggagttattacaacgaactactttgactcctggggccaagggacaatggtcaccgtctcctcagctagcaccaagggcccatcggtcttccccctggcgccctgctccaggagcaccggatcccaggtgcagctgcaggagtcgggcccaggactggtgaagccttcggagaccctgtccctcacctgcactgtctctggtggctccatcagtggttactactggagctggatccggcagcccccagggaagggactggagtggattgggtatatctattacagtgggagcaccaactacaatccctccctcaagagtcgagtcaccatatcagtagacacgtccaagaaccagttctccctgaagctgaattctgtgaccgctgcggacacggccgtgtattactgtgcgagagcccccttgcacggtgactacaaatggttccacccctggggccagggaaccctggtcaccgtctcctcagctagcaccaagggcccatccgtcttccccctggcgccctgctccaggagcacctccgagagcacagccgccctgggctgcctggtcaaggactacttccccgaaccggtgacggtgtcgtggaactcaggcgccctgaccagcggcgtgcacaccttcccggctgtcctacagtcctcaggactctactccctcagcagcgtggtgaccgtgccctccagcagcttgggcacgaagacctacacctgcaacgtagatcacaagcccagcaacaccaaggtggacaagagagttgagtccaaatatggtcccccatgcccatcatgcccagcacctgagttcctggggggaccatcagtcttcctgttccccccaaaacccaaggacactctcatgatctcccggacccctgaggtcacgtgcgtggtggtggacgtgagccaggaagaccccgaggtccagttcaactggtacgtggatggcgtggaggtgcataatgccaagacaaagccgcgggaggagcagttcaacagcacgtaccgtgtggtcagcgtcctcaccgtcctgcaccaggactggctgaacggcaaggagtacaagtgcaaggtctccaacaaaggcctcccgtcctccatcgagaaaaccatctccaaagccaaagggcagccccgagagccacaggtgtacaccctgcccccatcccaggaggagatgaccaagaaccaggtcagcctgacctgcctggtcaaaggcttctaccccagcgacatcgccgtggagtgggagagcaatgggcagccggagaacaactacaagaccacgcctcccgtgctggactccgacggctccttcttcctctacagcaggctaaccgtggacaagagcaggtggcaggaggggaatgtcttctcatgctccgtgatgcatgaggctctgcacaaccactacacacagaagagcctctccctgtctctgggtaaatga

SEQ ID NO: 327 - protein, 612 aa, Artificial
  Synthetic construct of 281VL4-G2(118-135)GS-281
MKHLWFFLLLVAAPRWVLSEVQLVQSGSELKKPGSSVKVSCKASGGTSRSFAISWVRQAPGQGLEWMGGIIPIFGPANYAQKFQGRVTITADESTSTAYMELSSLRSEDTAVYYCARHAIAMGWGVITTNYFDSWGQGTMVTVSSASTKGPSVFPLAPCSRSTGSQVQLQESGPGLVKPSETLSLTCTVSGGSISGYYWSWIRQPPGKGLEWIGYIYYSGSTNYNPSLKSRVTISVDTSKNQFSLKLNSVTAADTAVYYCARAPLHGDYKWFHPWGQGTLVTVSSASTKGPSVFPLAPCSRSTSESTAALGCLVKDYFPEPVTVSWNSGALTSGVHTFPAVLQSSGLYSLSSVVTVPSSSLGTKTYTCNVDHKPSNTKVDKRVESKYGPPCPSCPAPEFLGGPSVFLFPPKPKDTLMISRTPEVTCVVVDVSQEDPEVQFNWYVDGVEVHNAKTKPREEQFNSTYRVVSVLTVLHQDWLNGKEYKCKVSNKGLPSSIEKTISKAKGQPREPQVYTLPPSQEEMTKNQVSLTCLVKGFYPSDIAVEWESNGQPENNYKTTPPVLDSDGSFFLYSRLTVDKSRWQEGNVFSCSVMHEALHNHYTQKSLSLSLGK

SEQ ID NO: 328 - DNA, 1836 bp, Artificial
  Synthetic construct of 281VL4-G2(118-134)GS-281
atgaagcacctgtggttcttcctcctgctggtggcggctcccagatgggtcctgtccgaggtccagctggtgcagtctgggtctgagctgaagaagcctgggtcctcggtgaaggtctcctgcaaggcttctggaggcacctccaggagctttgctatcagctgggtgcgacaggcccctggacaaggacttgagtggatgggagggatcatccctatctttggtccagcaaactacgcacagaagttccagggcagagtcacgattaccgcggacgaatccacgagcacagcctacatggagctgagtagcctgagatctgaggacacggccgtgtattactgtgcgaggcacgctattgctatgggttggggagttattacaacgaactactttgactcctggggccaagggacaatggtcaccgtctcctcagctagcaccaagggcccatcggtcttccccctggcgccctgctccaggagcggatcccaggtgcagctgcaggagtcgggcccaggactggtgaagccttcggagaccctgtccctcacctgcactgtctctggtggctccatcagtggttactactggagctggatccggcagcccccagggaagggactggagtggattgggtatatctattacagtgggagcaccaactacaatccctccctcaagagtcgagtcaccatatcagtagacacgtccaagaaccagttctccctgaagctgaattctgtgaccgctgcggacacggccgtgtattactgtgcgagagcccccttgcacggtgactacaaatggttccacccctggggccagggaaccctggtcaccgtctcctcagctagcaccaagggcccatccgtcttccccctggcgccctgctccaggagcacctccgagagcacagccgccctgggctgcctggtcaaggactacttccccgaaccggtgacggtgtcgtggaactcaggcgccctgaccagcggcgtgcacaccttcccggctgtcctacagtcctcaggactctactccctcagcagcgtggtgaccgtgccctccagcagcttgggcacgaagacctacacctgcaacgtagatcacaagcccagcaacaccaaggtggacaagagagttgagtccaaatatggtcccccatgcccatcatgcccagcacctgagttcctggggggaccatcagtcttcctgttccccccaaaacccaaggacactctcatgatctcccggacccctgaggtcacgtgcgtggtggtggacgtgagccaggaagaccccgaggtccagttcaactggtacgtggatggcgtggaggtgcataatgccaagacaaagccgcgggaggagcagttcaacagcacgtaccgtgtggtcagcgtcctcaccgtcctgcaccaggactggctgaacggcaaggagtacaagtgcaaggtctccaacaaaggcctcccgtcctccatcgagaaaaccatctccaaagccaaagggcagccccgagagccacaggtgtacaccctgcccccatcccaggaggagatgaccaagaaccaggtcagcctgacctgcctggtcaaaggcttctaccccagcgacatcgccgtggagtgggagagcaatgggcagccggagaacaactacaagaccacgcctcccgtgctggactccgacggctccttcttcctctacagcaggctaaccgtggacaagagcaggtggcaggaggggaatgtcttctcatgctccgtgatgcatgaggctctgcacaaccactacacacagaagagcctctccctgtctctgggtaaatga

SEQ ID NO: 329 - protein, 611 aa, Artificial
  Synthetic construct of 281VL4-G2(118-134)GS-281
MKHLWFFLLLVAAPRWVLSEVQLVQSGSELKKPGSSVKVSCKASGGTSRSFAISWVRQAPGQGLEWMGGIIPIFGPANYAQKFQGRVTITADESTSTAYMELSSLRSEDTAVYYCARHAIAMGWGVITTNYFDSWGQGTMVTVSSASTKGPSVFPLAPCSRSGSQVQLQESGPGLVKPSETLSLTCTVSGGSISGYYWSWIRQPPGKGLEWIGYIYYSGSTNYNPSLKSRVTISVDTSKNQFSLKLNSVTAADTAVYYCARAPLHGDYKWFHPWGQGTLVTVSSASTKGPSVFPLAPCSRSTSESTAALGCLVKDYFPEPVTVSWNSGALTSGVHTFPAVLQSSGLYSLSSVVTVPSSSLGTKTYTCNVDHKPSNTKVDKRVESKYGPPCPSCPAPEFLGGPSVFLFPPKPKDTLMISRTPEVTCVVVDVSQEDPEVQFNWYVDGVEVHNAKTKPREEQFNSTYRVVSVLTVLHQDWLNGKEYKCKVSNKGLPSSIEKTISKAKGQPREPQVYTLPPSQEEMTKNQVSLTCLVKGFYPSDIAVEWESNGQPENNYKTTPPVLDSDGSFFLYSRLTVDKSRWQEGNVFSCSVMHEALHNHYTQKSLSLSLGK

SEQ ID NO: 330 - DNA, 1833 bp, Artificial
  Synthetic construct of 281VL4-G2(118-133)GS-281
atgaagcacctgtggttcttcctcctgctggtggcggctcccagatgggtcctgtccgaggtccagctggtgcagtctgggtctgagctgaagaagcctgggtcctcggtgaaggtctcctgcaaggcttctggaggcacctccaggagctttgctatcagctgggtgcgacaggcccctggacaaggacttgagtggatgggagggatcatccctatctttggtccagcaaactacgcacagaagttccagggcagagtcacgattaccgcggacgaatccacgagcacagcctacatggagctgagtagcctgagatctgaggacacggccgtgtattactgtgcgaggcacgctattgctatgggttggggagttattacaacgaactactttgactcctggggccaagggacaatggtcaccgtctcctcagctagcaccaagggcccatcggtcttccccctggcgccctgctccaggggatcccaggtgcagctgcaggagtcgggcccaggactggtgaagccttcggagaccctgtccctcacctgcactgtctctggtggctccatcagtggttactactggagctggatccggcagcccccagggaagggactggagtggattgggtatatctattacagtgggagcaccaactacaatccctccctcaagagtcgagtcaccatatcagtagacacgtccaagaaccagttctccctgaagctgaattctgtgaccgctgcggacacggccgtgtattactgtgcgagagcccccttgcacggtgactacaaatggttccacccctggggccagggaaccctggtcaccgtctcctcagctagcaccaagggcccatccgtcttccccctggcgccctgctccaggagcacctccgagagcacagccgccctgggctgcctggtcaaggactacttccccgaaccggtgacggtgtcgtggaactcaggcgccctgaccagcggcgtgcacaccttcccggctgtcctacagtcctcaggactctactccctcagcagcgtggtgaccgtgccctccagcagcttgggcacgaagacctacacctgcaacgtagatcacaagcccagcaacaccaaggtggacaagagagttgagtccaaatatggtcccccatgcccatcatgcccagcacctgagttcctggggggaccatcagtcttcctgttccccccaaaacccaaggacactctcatgatctcccggacccctgaggtcacgtgcgtggtggtggacgtgagccaggaagaccccgaggtccagttcaactggtacgtggatggcgtggaggtgcataatgccaagacaaagccgcgggaggagcagttcaacagcacgtaccgtgtggtcagcgtcctcaccgtcctgcaccaggactggctgaacggcaaggagtacaagtgcaaggtctccaacaaaggcctcccgtcctccatcgagaaaaccatctccaaagccaaagggcagccccgagagccacaggtgtacaccctgcccccatcccaggaggagatgaccaagaaccaggtcagcctgacctgcctggtcaaaggcttctaccccagcgacatcgccgtggagtgggagagcaatgggcagccggagaacaactacaagaccacgcctcccgtgctggactccgacggctccttcttcctctacagcaggctaaccgtggacaagagcaggtggcaggaggggaatgtcttctcatgctccgtgatgcatgaggctctgcacaaccactacacacagaagagcctctccctgtctctgggtaaatga

SEQ ID NO: 331 - protein, 610 aa, Artificial
  Synthetic construct of 281VL4-G2(118-133)GS-281
MKHLWFFLLLVAAPRWVLSEVQLVQSGSELKKPGSSVKVSCKASGGTSRSFAISWVRQAPGQGLEWMGGIIPIFGPANYAQKFQGRVTITADESTSTAYMELSSLRSEDTAVYYCARHAIAMGWGVITTNYFDSWGQGTMVTVSSASTKGPSVFPLAPCSRGSQVQLQESGPGLVKPSETLSLTCTVSGGSISGYYWSWIRQPPGKGLEWIGYIYYSGSTNYNPSLKSRVTISVDTSKNQFSLKLNSVTAADTAVYYCARAPLHGDYKWFHPWGQGTLVTVSSASTKGPSVFPLAPCSRSTSESTAALGCLVKDYFPEPVTVSWNSGALTSGVHTFPAVLQSSGLYSLSSVVTVPSSSLGTKTYTCNVDHKPSNTKVDKRVESKYGPPCPSCPAPEFLGGPSVFLFPPKPKDTLMISRTPEVTCVVVDVSQEDPEVQFNWYVDGVEVHNAKTKPREEQFNSTYRVVSVLTVLHQDWLNGKEYKCKVSNKGLPSSIEKTISKAKGQPREPQVYTLPPSQEEMTKNQVSLTCLVKGFYPSDIAVEWESNGQPENNYKTTPPVLDSDGSFFLYSRLTVDKSRWQEGNVFSCSVMHEALHNHYTQKSLSLSLGK

SEQ ID NO: 332 - DNA, 1830 bp, Artificial
  Synthetic construct of 281VL4-G2(118-132)GS-281
atgaagcacctgtggttcttcctcctgctggtggcggctcccagatgggtcctgtccgaggtccagctggtgcagtctgggtctgagctgaagaagcctgggtcctcggtgaaggtctcctgcaaggcttctggaggcacctccaggagctttgctatcagctgggtgcgacaggcccctggacaaggacttgagtggatgggagggatcatccctatctttggtccagcaaactacgcacagaagttccagggcagagtcacgattaccgcggacgaatccacgagcacagcctacatggagctgagtagcctgagatctgaggacacggccgtgtattactgtgcgaggcacgctattgctatgggttggggagttattacaacgaactactttgactcctggggccaagggacaatggtcaccgtctcctcagctagcaccaagggcccatcggtcttccccctggcgccctgctccggatcccaggtgcagctgcaggagtcgggcccaggactggtgaagccttcggagaccctgtccctcacctgcactgtctctggtggctccatcagtggttactactggagctggatccggcagcccccagggaagggactggagtggattgggtatatctattacagtgggagcaccaactacaatccctccctcaagagtcgagtcaccatatcagtagacacgtccaagaaccagttctccctgaagctgaattctgtgaccgctgcggacacggccgtgtattactgtgcgagagcccccttgcacggtgactacaaatggttccacccctggggccagggaaccctggtcaccgtctcctcagctagcaccaagggcccatccgtcttccccctggcgccctgctccaggagcacctccgagagcacagccgccctgggctgcctggtcaaggactacttccccgaaccggtgacggtgtcgtggaactcaggcgccctgaccagcggcgtgcacaccttcccggctgtcctacagtcctcaggactctactccctcagcagcgtggtgaccgtgccctccagcagcttgggcacgaagacctacacctgcaacgtagatcacaagcccagcaacaccaaggtggacaagagagttgagtccaaatatggtcccccatgcccatcatgcccagcacctgagttcctggggggaccatcagtcttcctgttccccccaaaacccaaggacactctcatgatctcccggacccctgaggtcacgtgcgtggtggtggacgtgagccaggaagaccccgaggtccagttcaactggtacgtggatggcgtggaggtgcataatgccaagacaaagccgcgggaggagcagttcaacagcacgtaccgtgtggtcagcgtcctcaccgtcctgcaccaggactggctgaacggcaaggagtacaagtgcaaggtctccaacaaaggcctcccgtcctccatcgagaaaaccatctccaaagccaaagggcagccccgagagccacaggtgtacaccctgcccccatcccaggaggagatgaccaagaaccaggtcagcctgacctgcctggtcaaaggcttctaccccagcgacatcgccgtggagtgggagagcaatgggcagccggagaacaactacaagaccacgcctcccgtgctggactccgacggctccttcttcctctacagcaggctaaccgtggacaagagcaggtggcaggaggggaatgtcttctcatgctccgtgatgcatgaggctctgcacaaccactacacacagaagagcctctccctgtctctgggtaaatga

SEQ ID NO: 333 - protein, 609 aa, Artificial
  Synthetic construct of 281VL4-G2(118-132)GS-281
MKHLWFFLLLVAAPRWVLSEVQLVQSGSELKKPGSSVKVSCKASGGTSRSFAISWVRQAPGQGLEWMGGIIPIFGPANYAQKFQGRVTITADESTSTAYMELSSLRSEDTAVYYCARHAIAMGWGVITTNYFDSWGQGTMVTVSSASTKGPSVFPLAPCSGSQVQLQESGPGLVKPSETLSLTCTVSGGSISGYYWSWIRQPPGKGLEWIGYIYYSGSTNYNPSLKSRVTISVDTSKNQFSLKLNSVTAADTAVYYCARAPLHGDYKWFHPWGQGTLVTVSSASTKGPSVFPLAPCSRSTSESTAALGCLVKDYFPEPVTVSWNSGALTSGVHTFPAVLQSSGLYSLSSVVTVPSSSLGTKTYTCNVDHKPSNTKVDKRVESKYGPPCPSCPAPEFLGGPSVFLFPPKPKDTLMISRTPEVTCVVVDVSQEDPEVQFNWYVDGVEVHNAKTKPREEQFNSTYRVVSVLTVLHQDWLNGKEYKCKVSNKGLPSSIEKTISKAKGQPREPQVYTLPPSQEEMTKNQVSLTCLVKGFYPSDIAVEWESNGQPENNYKTTPPVLDSDGSFFLYSRLTVDKSRWQEGNVFSCSVMHEALHNHYTQKSLSLSLGK

SEQ ID NO: 334 - protein, 14 aa, Artificial
  Synthetic construct of CH1(IGHA)
ASPTSPKVFPLSLC

SEQ ID NO: 335 - protein, 14 aa, Artificial
  Synthetic construct of CH1(IGHD(14))
APTKAPDVFPIISC

SEQ ID NO: 336 - protein, 14 aa, Artificial
  Synthetic construct of CH1(IGHE)
ASTQSPSVFPLTRC

SEQ ID NO: 337 - protein, 14 aa, Artificial
  Synthetic construct of CH1(IGHGP)
ASTKGPSVFPLVPC

SEQ ID NO: 338 - protein, 14 aa, Artificial
  Synthetic construct of CH1(IGHM)
GSASAPTLFPLVSC

SEQ ID NO: 339 - protein, 14 aa, Artificial
  Synthetic construct of CH1(118-131/A118G)
GSTKGPSVFPLAPC

SEQ ID NO: 340 - protein, 14 aa, Artificial
  Synthetic construct of CH1(118-131/S119T)
ATTKGPSVFPLAPC

SEQ ID NO: 341 - protein, 14 aa, Artificial
  Synthetic construct of CH1(118-131/P123F)
ASTKGFSVFPLAPC

SEQ ID NO: 342 - protein, 14 aa, Artificial
  Synthetic construct of CH1(118-131/V125L)
ASTKGPSLFPLAPC

SEQ ID NO: 343 - protein, 14 aa, Artificial
  Synthetic construct of CH1(118-131/V125I)
ASTKGPSIFPLAPC

SEQ ID NO: 344 - protein, 14 aa, Artificial
  Synthetic construct of CH1(118-131/F126L)
ASTKGPSVLPLAPC

SEQ ID NO: 345 - protein, 14 aa, Artificial
  Synthetic construct of CH1(118-131/F126Y)
ASTKGPSVYPLAPC

SEQ ID NO: 346 - protein, 14 aa, Artificial
  Synthetic construct of CH1(118-131/P127G)
ASTKGPSVFGLAPC

SEQ ID NO: 347 - protein, 14 aa, Artificial
  Synthetic construct of CH1(118-131/L128V)
ASTKGPSVFPVAPC

SEQ ID NO: 348 - protein, 14 aa, Artificial
  Synthetic construct of CH1(118-131/L128I)
ASTKGPSVFPIAPC

SEQ ID NO: 349 - protein, 14 aa, Artificial
  Synthetic construct of CH1(118-131/A129I)
ASTKGPSVFPLIPC

SEQ ID NO: 350 - protein, 14 aa, Artificial
  Synthetic construct of CH1(118-131/A118S)
SSTKGPSVFPLAPC

SEQ ID NO: 351 - protein, 14 aa, Artificial
  Synthetic construct of CH1(118-131/S119A)
AATKGPSVFPLAPC

SEQ ID NO: 352 - protein, 14 aa, Artificial
  Synthetic construct of CH1(118-131/T120A)
ASAKGPSVFPLAPC

SEQ ID NO: 353 - protein, 14 aa, Artificial
  Synthetic construct of CH1(118-131/K121A)
ASTAGPSVFPLAPC

SEQ ID NO: 354 - protein, 14 aa, Artificial
  Synthetic construct of CH1(118-131/G122A)
ASTKAPSVFPLAPC

SEQ ID NO: 355 - protein, 14 aa, Artificial
  Synthetic construct of CH1(118-131/P123A)
ASTKGASVFPLAPC

SEQ ID NO: 356 - protein, 14 aa, Artificial
  Synthetic construct of CH1(118-131/S124A)
ASTKGPAVFPLAPC

SEQ ID NO: 357 - protein, 14 aa, Artificial
  Synthetic construct of CH1(118-131/V125A)
ASTKGPSAFPLAPC

SEQ ID NO: 358 - protein, 14 aa, Artificial
  Synthetic construct of CH1(118-131/F126A)
ASTKGPSVAPLAPC

SEQ ID NO: 359 - protein, 14 aa, Artificial
  Synthetic construct of CH1(118-131/P127A)
ASTKGPSVFALAPC

SEQ ID NO: 360 - protein, 14 aa, Artificial [sequence omitted]

SEQ ID NO: 361 - protein, 14 aa, Artificial
  Synthetic construct of CH1(118-131/A129S)
ASTKGPSVFPLSPC

SEQ ID NO: 362 - protein, 25 aa, Artificial
  Synthetic construct of 281VL4-A1 (118-142)281
ASPTSPKVFPLSLCSTQPDGNVVIA

SEQ ID NO: 363 - protein, 25 aa, Artificial
  Synthetic construct of 281VL4-A2 (118-142)281
ASPTSPKVFPLSLCSTPQDGNVVVA

SEQ ID NO: 364 - protein, 27 aa, Artificial
  Synthetic construct of 281VL4-D (118-144)281
APTKAPDVFPIISGCRHPKDNSPVVLA

SEQ ID NO: 365 - protein, 28 aa, Artificial
  Synthetic construct of 281VL4-E (118-145)281
ASTQSPSVFPLTRCCKNIPSNATSVTLG

SEQ ID NO: 366 - protein, 26 aa, Artificial
  Synthetic construct of 281VL4-G1 (118-143)281
ASTKGPSVFPLAPCSKSTSGGTAALG

SEQ ID NO: 367 - protein, 26 aa, Artificial
  Synthetic construct of 281VL4-G2 (118-143)281
ASTKGPSVFPLAPCSRSTSESTAALG

SEQ ID NO: 368 - protein, 26 aa, Artificial
  Synthetic construct of 281VL4-G3 (118-143)281
ASTKGPSVFPLAPCSRSTSGGTAALG

SEQ ID NO: 369 - protein, 26 aa, Artificial
  Synthetic construct of 281VL4-HGP (118-143)281
ASTKGPSVFPLVPCSRSVSEGTAALG

SEQ ID NO: 370 - protein, 27 aa, Artificial
  Synthetic construct of 281VL4-M (118-144)281
GSASAPTLFPLVSCENSPSDTSSVAVG

SEQ ID NO: 371 - protein, 18 aa, Artificial
  Synthetic construct of 281VL4-G2 (118-135)281
ASTKGPSVFPLAPCSRST

SEQ ID NO: 372 - protein, 17 aa, Artificial
  Synthetic construct of 281VL4-G2 (118-134)281
ASTKGPSVFPLAPCSRS

SEQ ID NO: 373 - protein, 16 aa, Artificial
  Synthetic construct of 281VL4-G2 (118-133)281
ASTKGPSVFPLAPCSR

SEQ ID NO: 374 - protein, 15 aa, Artificial
  Synthetic construct of 281VL4-G2 (118-132)281
ASTKGPSVFPLAPCS

SEQ ID NO: 375 - protein, 15 aa, Artificial
  Synthetic construct of CH1(IGHD(15))
APTKAPDVFPIISGC

1. A multivalent antibody comprising multiple heavy chain variable regions of antibody (hereinafter, referred to as VH) linked to each other via a linker comprising an amino acid sequence encoding an immunoglobulin domain or a fragment thereof.

2. The multivalent antibody according to claim 1, wherein the immunoglobulin domain is an immunoglobulin domain comprising CH1, hinge, CH2, and/or CH3.

3. The multivalent antibody according to claim 2, wherein the immunoglobulin domain is CH1 or a CH1 fragment.

4. The multivalent antibody according to claim 3, wherein the CH1 fragment is a CH1 fragment comprising 14 amino acids with cysteine (Cys) at position 14.

5. The multivalent antibody according to claim 4, wherein the CH1 fragment is an amino acid sequence at position 1 to 14 from the N-terminal of an amino acid sequence of CH1 of an antibody subclass selected from IgD, IgM, IgG, IgA and IgE.

6. The multivalent antibody according to claim 5, wherein the amino acid sequence of the CH1 fragment is the amino acid sequences represented by any one selected from SEQ ID NO:311, and SEQ ID NOs:334 to NO:361.

7. The multivalent antibody according to claim 3, wherein the amino acid sequence of the CH1 fragment is the amino acid sequences represented by any one selected from SEQ ID NOs:362 to 375.

8. The multivalent antibody according to claim 1, comprising the same light chains.

9. A DNA encoding an amino acid sequence of the multivalent antibody according to claim 1.

10. A recombination vector comprising the DNA according to claim 9.

11. A transformant into which the recombination vector according to claim 10 is introduced.

12. A method for producing the multivalent antibody according to claim 1, which comprises culturing a transformant which contains a recombination vector, said recombinant vector comprising a DNA encoding an amino acid sequence of said multivalent antibody, in a medium to produce and accumulate the multivalent antibody described in claim 1 in the culture, and recovering the antibody or the fragment of the antibody from the culture.
